United States Patent Application Publication US 2026/0227408 A1 - sequence listing, part 5

SEQ ID NO: 32271 - protein, 565 aa, Homo sapiens
LSPTRLSRLQEKEELRELNDRLAVYIDKVRSLETENSALQLQVTEREEVRGRELTGLKALYETELADARRALDDTARERAKLQIELGKCKAEHDQLLLNYAKKESDLNGAQIKLREYEAALNSKDAALATALGDKKSLEGDLEDLKDQIAQLEASLAAAKKQLADETLLKVDLENRCQSLTEDLEFRKSMYEEEINETRRKHETRLVEVDSGRQIEYEYKLAQALHEMREQHDAQVRLYKEELEQTYHAKLENARLSSEMNTSTVNSAREELMESRMRIESLSSQLSNLQKESRACLERIQELEDLLAKEKDNSRRMLTDKEREMAEIRDQMQQQLNDYEQLLDVKLALDMEISAYRKLLEGEEERLKLSPSPSSRVTVSRASSSRSVRTTRGKRKRVDVEESEASSSVSISHSASATGNVCIEEIDVDGKFIRLKNTSEQDQPMGGWEMIRKIGDTSVSYKYTSRYVLKAGQTVTIWAANAGVTASPPTDLIWKNQNSWGTGEDVKVILKNSQGEEVAQRSTVFKTTIPEEEEEEEEAAGVVVEEELFHQQGTPRASNRSCAIM

SEQ ID NO: 32272 - protein, 27 aa, Homo sapiens
LFGVCYTPVLCPVSSEKVCICYSSESS

SEQ ID NO: 32273 - protein, 27 aa, Homo sapiens
RQKFGYSVNRKRLNRNARRKAAPRIEW

SEQ ID NO: 32274 - protein, 52 aa, Homo sapiens
KWNTERRSVRMPICPASTPQPPQGTSCPSAGAKEPVLCLNVATWCSGLMKGM

SEQ ID NO: 32275 - protein, 27 aa, Homo sapiens
ILRMSTISHAINVLVLKNTYLVLVRYF

SEQ ID NO: 32276 - protein, 31 aa, Homo sapiens
LSLQMDPSVLLEARMARPCYGISTKANTFTR

SEQ ID NO: 32277 - protein, 52 aa, Homo sapiens
ILGEWEGDATARRAVSPAHHPHRGHRCWPCCPWSCGHWSCGRCCDVEEEELR

SEQ ID NO: 32278 - protein, 252 aa, Homo sapiens
LEALTYISEDGDTLVHLAVIHEAPAVLLCCLALLPQEVLDIQNNLYQTALHLAVHLDQPGAVRALVLKGASRALQDRHGDTALHVACQRQHLACARCLLEGRPEPGRGTSHSLDLQLQNWQGLACLHIATLQKNQPLMELLLRNGADIDVQEGTSGKTALHLAVETQERGLVQFLLQAGAQVDARMLNGCTPLHLAAGRGLMGISSTLCKAGADSLLRNVEDETPQDLTEESLVLLPFDDLKISGKLLLCTD

SEQ ID NO: 32279 - protein, 733 aa, Homo sapiens
ILMKLRSSHNASKTLNANNMETLIECQSEGDIKEHPLLASCESEDSICQLIEVKKRKKVLSWPFLMRRLSPASDFSGALETDLKASLFDQPLSIICGDSDTLPRPIQDILTILCLKGPSTEGIFRRAANEKARKELKEELNSGDAVDLERLPVHLLAVVFKDFLRSIPRKLLSSDLFEEWMGALEMQDEEDRIEALKQVADKLPRPNLLLLKHLVYVLHLISKNSEVNRMDSSNLAICIGPNMLTLENDQSLSFEAQKDLNNKVKTLVEFLIDNCFEIFGENIPVHSSITSDDSLEHTDSSDVSTLQNDSAYDSNDPDVESNSSSGISSPSRQPQVPMATAAGLDSAGPQDAREVSPEPIVSTVARLKSSLAQPDRRYSEPSMPSSQECLESRVTNQTLTKSEGDFPVPRVGSRLESEEAEDPFPEEVFPAVQGKTKRPVDLKIKNLAPGSVLPRALVLKAFSSSSLDASSDSSPVASPSSPKRNFFSRHQSFTTKTEKGKPSREIKKHSMSFTFAPHKKVLTKNLSAGSGKSQDFTRDHVPRGVRKESQLAGRIVQENGCETHNQTARGFCLRPHALSVDDVFQGADWERPGSPPSYEEAMQGPAARLVASESQTVGSMTVGSMRARMLEAHCLLPPLPPAHHVEDSRHRGSKEPLPGHGLSPLPERWKQSRTVHASGDSLGHVSGPGRPELLPLRTVSESVQRNKRDCLVRRCSQPVFEADQFQYAKESYI

SEQ ID NO: 32280 - protein, 47 aa, Homo sapiens
INFFRNKSTGKDYVLYKNKSRLRACKNMCKHQGGLFIKDIEDLAGSC

SEQ ID NO: 32281 - protein, 144 aa, Homo sapiens
LEEKLNDQLEEQRQEQALQRYRCEADELDSWLLSTKATLDTALSPPKEPMDMEAQLMDCQNMLVEIEQKVVALSELSVHNENLLLEGKAHTKDEAEQLAGKLRRLKGSLLELQRALHDKQLNMQVRVPAAGPQLKVGTLFTCSF

SEQ ID NO: 32282 - protein, 106 aa, Homo sapiens
KQFKYGNQLVRLAHREQVALYVDLDDVAEDDPELVDSICENARRYAKLFADAVQELLPQYKEREVVNKDVLDVYIEHRLMMEQRSRDPGMVRSPQNQYPAELMRRL

SEQ ID NO: 32283 - protein, 75 aa, Homo sapiens
LQTRGSRFIKFQEMKMQEHSDQVPVGNIPRSITVLVEGENTRIAQPGDHVSVTGIFLPILRTGFRQVVQVRKSLT

SEQ ID NO: 32284 - protein, 170 aa, Homo sapiens
IQFHFHWGSLDGQGSEHTVDKKKYAAELHLVHWNTKYGDFGKAVQQPDGLAVLGIFLKVGSAKPGLQKVVDVLDSIKTKGKSADFTNFDPRGLLPESLDYWTYPGSLTTPPLLECVTWIVLKEPISVSSEQVLKFRKLNFNGEGEPEELMVDNWRPAQPLKNRQIKASFK

SEQ ID NO: 32285 - protein, 151 aa, Homo sapiens
VVKVPEVNSSALPHKLRIKAKAMQIKVEAFDNEFEATQKLSSPIDMTSKRHFELEKHSAPSMVHSSLTPFSVQVTNIQDWSLKSEHWHQKELSGKTQNSFKTGVVEMKDSGYKVSDPENLYLKQGIANLSAEVVSLKRLIATQPISASDSG

SEQ ID NO: 32286 - protein, 18 aa, Homo sapiens
LQLDCLTMDIYLRVQLKI

SEQ ID NO: 32287 - protein, 617 aa, Homo sapiens
LELEPAPEQDPAPSQTLELEPAPAPVPSLQPSWPSPVVAENGLSEEKPHLLVFPPDLVAEQFTLMDAELFKKVVPYHCLGSIWSQRDKKGKEHLAPTIRATVTQFNSVANCVITTCLGNRSTKAPDRARVVEHWIEVARECRILKNFSSLYAILSALQSNSIHRLKKTWEDVSRDSFRIFQKLSEIFSDENNYSLSRELLIKEGTSKFATLEMNPKRAQKRPKETGIIQGTVPYLGTFLTDLVMLDTAMKDYLYGRLINFEKRRKEFEVIAQIKLLQSACNNYSIAPDEQFGAWFRAVERLSETESYNLSCELEPPSESASNTLRTKKNTAIVKRWSDRQAPSTELSTSGSSHSKSCDQLRCGPYLSSGDIADALSVHSAGSSSSDVEEINISFVPESPDGQEKKVTACPSPQYPFPSPHSKSMHGARKPWILNTASRRFPIWQLAWGAPTGQWDLLILPSPSVLGISLTVIPGDLRHQLSLQQHLVLLSLHHARGCHTHPQALCLRALQLQLRAAALQPAGGRLLYHPRQPGRGQWQHVQEHPGKPAGVAWVPPSTGGKCTLNTVHHPCPPGVYLVVGGEGQMSARYRNEEGSDQGQGWPEGRGGGKEQPCKAPRS

SEQ ID NO: 32288 - protein, 28 aa, Homo sapiens
LSGTGPSLTSPQSCPATPAPATASPAAT

SEQ ID NO: 32289 - protein, 6 aa, Homo sapiens
VETVRP

SEQ ID NO: 32290 - protein, 278 aa, Homo sapiens
KGRHKTTGQVVAMKKIRLESEEEGVPSTAIREISLLKELRHPNIVSLQDVLMQDSRLYLIFEFLSMDLKKYLDSIPPGQYMDSSLVKSYLYQILQGIVFCHSRRVLHRDLKPQNLLIDDKGTIKLADFGLARAFGIPIRVYTHEVVTLWYRSPEVLLGSARYSTPVDIWSIGTIFAELATKKPLFHGDSEIDQLFRIFRALGTPNNEVWPEVESLQDYKNTFPKWKPGSLASHVKNLDENGLDLLSKMLIYDPAKRISGKMALNHPYFNDLDNQIKKM

SEQ ID NO: 32291 - protein, 138 aa, Homo sapiens
KSELENIKGIFVFGNPQLSVIALGSRDFDIYRLSNLMTAKGWNLNQLQFPPSIHFCITLLHARKRVAIQFLKDIRESVTQIMKNPKAKTTGMGAIYGMAQTTVDRNMVAELSSVFLDSLYSTDTVTQGSQMNGSPKPH

SEQ ID NO: 32292 - protein, 30 aa, Homo sapiens
RPMLVLAKSRRSKGAAMMLAVATVDFSQEH

SEQ ID NO: 32293 - protein, 25 aa, Homo sapiens
VLFSSLCLDRNLPDMMQLWSEIFNK

SEQ ID NO: 32294 - protein, 491 aa, Homo sapiens
LTMMGPSPDWNVGLSAEDLCTKECGWVQKVVQDLIPWDAGTDSGVTYESPNKPTIPQEKIRPLTSLDHPQSPFYDPEGGSITQVARVVIERIARKGEQCNIVPDNVDDIVADLAPEEKDEDDTPETCIYSNWSPWSACSSSTCDKGKRMRQRMLKAQLDLSVPCPDTQDFQPCMGPGCSDEDGSTCTMSEWITWSPCSISCGMGMRSRERYVKQFPEDGSVCTLPTEETEKCTVNEECSPSSCLMTEWGEWDECSATCGMGMKKRHRMIKMNPADGSMCKAETSQAEKCMMPECHTIPCLLSPWSEWSDCSVTCGKGMRTRQRMLKSLAELGDCNEDLEQVEKCMLPECPIDCELTEWSQWSECNKSCGKGHVIRTRMIQMEPQFGGAPCPETVQRKKCRIRKCLRNPSIQKLRWREARESRRSEQLKEESEGEQFPGCRMRPWTAWSECTKLCGGGIQERYMTVKKRFKSSQFTSCKDKKEIRACNVHPC

SEQ ID NO: 32295 - protein, 28 aa, Homo sapiens
IIYLPEHEVEDHPATVLLSLDYMFTYCS

SEQ ID NO: 32296 - protein, 141 aa, Homo sapiens
MDYDYALLELKKPHKRKFMKIGVSPPAKQLPGGRIHFSGYDNDRPGNLVYRFCDVKDETYDLLYQQCDAQPGASGSGVYVRMWKRQQQKWERKIIGIFSGHQWVDMNGSPQDFNVAVRITPLKYAQICYWIKGNYLDCREG

SEQ ID NO: 32297 - protein, 26 aa, Homo sapiens
RSSSSTSKLLTQSGPSLPQPPASRPF

SEQ ID NO: 32298 - protein, 78 aa, Homo sapiens
LEVEMMADMYNRMTSACHRKCVPPHYKEAELSKGESVCLDRCVSKYLDIHERMGKKLTELSMQDEELMKRVQQSSGPA

SEQ ID NO: 32299 - protein, 117 aa, Homo sapiens
VWDEAEQDGIGEEVLKMSTEEIIQRTRLLDSEIKIMKSEVLRVTHELQAMKDKIKENSEKIKVNKTLPYLVSNVIELLDVDPNDQEEDGANIDLDSQRKGKCAVIKTSTRQVSVAQQ

SEQ ID NO: 32300 - protein, 45 aa, Homo sapiens
KQIHAVRYLECSALQQDGVKEVFAEAVRAVLNPTPIKRGRSCILL

SEQ ID NO: 32301 - protein, 20 aa, Homo sapiens
IGIVQPENIQPPLQCQKSHG

SEQ ID NO: 32302 - protein, 918 aa, Homo sapiens
VRNHTYQMLTLLAEDRAVPSAPTGPGPLLEFALHEDLLTRVLTWQLQWDELGDGVEERRAEQLKLFEMLVSEARQPLLRHGPVREALLTLLDACGRPVPSSPALDEGLVLLLSQLCVCVAQEPSLLEFFLQPPPEPGAAPRLLLFSRLVPFVHREGTLGQQARDALLLLMALSAGSPTVGRYIADHSYFCPVLATGLSALYSSLPRKIEVPGDDWHCLRREDWLGVPALALFMSSLEFCNAVIQVAHPLVQKQLVDYIHNGFLVPVMGPALHKTSVEEMIASTAYLELFLRSISEPALLRTFLRFLLLHRHDTHTILDTLVARIGSNSRLCMVSLSLFRTLLNLSCEDVLLQLVLRYLVPCNHVMLSQKPAVRDVDLYGRAADKFLSLIPRCCRHHAPSPPRPEHASWARGGPSRETGRREDITGPGSPSVDSSSVTTVPRPSTPSRLALFLRQQSLGGSESPGPAPCSPGLSASPASSPGRRPTPAEEPGELEDNYLEYLREARRGVDRCVRACRTWSAPYDGERPSPEPSPFGSRTKKRSLLPEEDRNNVGEGEEEELGRRGRAGGAGEGPGHLPPPQLNGVPGSWPEGAKKVRLVPKEGAGELLEGISEGMAGLEGFGQELRELEVALSNGGTGSESPLEPPLPLEEEEAYESFTCPPEPPGPFLSSPLRTLNQLPSQPFTGPFMAVLFAKLENMLQNSVYVNFLLTGLVAQLACHPQPLLRSFLLNTNMVFQPSVKSLLQVLGSVKNKIENFAASQEDFPALLSKAKKYLIARGKLDWAEGPAAGPAPRRSDPLVKSRRPSLGELLLRHAHSPTRARQAAQLVLQPGRDGAGLGLSGGSPGASTPVLLTRGGAPERQGEALRVKNAVYCAVIFPEFLKELAAISQAHAVTSPFLLETSEEGSGPLISGCGPLNP

SEQ ID NO: 32303 - protein, 13 aa, Homo sapiens
LNNKYSEGYPGKR

SEQ ID NO: 32304 - protein, 463 aa, Homo sapiens
LEFFETVVRYEKFFTVEPQHIPCVLMAFLDHRGLRHSSAKVRSRTAYLFSRFVKSLNKQMNPFIEDILNRIQDLLELSPPENGHQSLLSSDDQLFIYETAGVLIVNSEYPAERKQALMRNLLTPLMEKFKILLEKLMLAQDEERQASLADCLNHAVGFASRTSKAFSNKQTVKQCGCSEVYLDCLQTFLPALSCPLQKDILRSGVRTFLHRMIICLEEEVLPFIPSASEHMLKDCEAKDLQEFIPLINQITAKFKIQVSPFLQQMFMPLLHAIFEVLLRPAEENDQSAALEKQMLRRSYFAFLQTVTGSGMSEVIANQGAENVERVLVTVIQGAVEYPDPIAQKTCFIILSKLVELWGGKDGPVGFADFVYKHIVPACFLAPLKQTFDLADAQTVLALSECAVTLKTIHLKRGPECVQYLQQEYLPSLQVAPEIIQEFCQALQQPDAKVFKNYLKVFFQRAKP

SEQ ID NO: 32305 - protein, 8 aa, Homo sapiens
LVSSVTRP

SEQ ID NO: 32306 - protein, 64 aa, Homo sapiens
ISSDAFEVDVCGQCGLLGYSGWCHYCKSSCHVSSLRIPYACKLLFQELQSMNIIPRLKLSKYNE

SEQ ID NO: 32307 - protein, 118 aa, Homo sapiens
ITSEVIEKCTTPLSDDHDEKYGVPSLEELGFDTDGLSSAVWPGGETEALTRLERHLERKAWVANFERPRMNANSLLASPTGLSPYLRFGCLSCRLFYFKLTDLYKKVFSKIRAYCLIL

SEQ ID NO: 32308 - protein, 71 aa, Homo sapiens
LLGTAWARRSQDLHCGACRALVDELEWEIAQVDPKKTIQMGSFRINPDGSQSVVEVTVTVPPNKVAHSGFG

SEQ ID NO: 32309 - protein, 11 aa, Homo sapiens
IWKLGSQLGSS

SEQ ID NO: 32310 - protein, 6 aa, Homo sapiens
LILTKL

SEQ ID NO: 32311 - protein, 138 aa, Homo sapiens
IADQRNFIFASSKNEKPQGNYSVIPPSSRDLASQKGNISETIVIDDEEDIETNGGAEKKSSCFIEWGLPGTKNKTNDLDFSTSSLSRSKVNAGMGNSGITTELTLKYIITNVTTLETGISSVNAGQDVNIIITYKTSL

SEQ ID NO: 32312 - protein, 496 aa, Homo sapiens
VRLFLHYGRVVPFISAIASAEVKRTQDPNTIFRGNSLASKCIDETMKLAGMHYLHVTLKPAIEEICQSHKPCEIDPVKLKDGENLENNMENLRQYVDRVFHAITESGVSCPTVMCDIFFSLREAAAKRFQDDPDVRYTAVSSFIFLRFFAPAILSPNLFQLTPHHTDPQTSRTLTLISKTVQTLGSLSKSKSASFKESYMATFYEFFNEQKYADAVKNFLDLISSSGRRDPKSVEQPIVLKEGFMIKRAQGRKRFGMKNFKKRWFRLTNHEFTYHKSKGDQPLYSIPIENILAVEKLEEESFKMKNMFQVIQPERALYIQANNCVEAKDWIDILTKVSQCNQKRLTVYHPSAYLSGHWLCCRAPSDSAPGCSPCTGGLPANIQLDIDGDRETERIYSLFNLYMSKLEKMQEACGSKSVYDGPEQEEYSTFVIDDPQETYKTLKQVIAGVGALEQEHAQYKRDKFKKTKYGSQEHPIGDKSFQNYIRQQSETSTHSI

SEQ ID NO: 32313 - protein, 55 aa, Homo sapiens
MQMMLCMSLMEKNSVVKGLLLNMLGLGHEVEEVEDDTLTVLVVADLEMIDEMLHL

SEQ ID NO: 32314 - protein, 35 aa, Homo sapiens
LETAGWTPTCAFQLLLEPQGPRKAVWSLQPASRDF

SEQ ID NO: 32315 - protein, 62 aa, Homo sapiens
LFEIFLVEKWGSKFPPLNLGRPSDCLTNRNSMEATLYRFLRLSLKRLAVPTSCHLGIIVLET

SEQ ID NO: 32316 - protein, 164 aa, Homo sapiens
ICEDDWNSGERFTCTVTHTDLPSPLKQTISRPKGVALHRPDVYLLPPAREQLNLRESATITCLVTGFSPADVFVQWMQRGQPLSPEKYVTSAPMPEPQAPGRYFAHSILTVSEEEWNTGETYTCVVAHEALPNRVTERTVDKSTGKPTLYNVSLVMSDTAGTCY

SEQ ID NO: 32317 - protein, 22 aa, Homo sapiens
VGLLWSTLWTEKHRGYRTQLLP

SEQ ID NO: 32318 - protein, 28 aa, Homo sapiens
VSGGGLFFRGVKGSVDISGLQGLPSGTI

SEQ ID NO: 32319 - protein, 16 aa, Homo sapiens
MRRRMRMRRSMMKMLR

SEQ ID NO: 32320 - protein, 37 aa, Homo sapiens
LPFLSIECTLYNFSGIVIENKIFTIITGFFQVTSCRL

SEQ ID NO: 32321 - protein, 34 aa, Homo sapiens
LQELEELELTNCPGATPELFKYFSQHLPRCLVIE

SEQ ID NO: 32322 - protein, 873 aa, Homo sapiens
LSSGMEPETALWGPDLQGPEQSPNDAHRGAESENEEESPRQESSGEEIIMGDPAQSPESKDSTEMSLERSSQDPSVPQNPPTPLGHSNPLDHQIPLDPPAPEVVPTPSDWTKACEASWQWGALTTWNSPPVVPANEPSLRELVQGRPAGAEKPYICNECGKSFSQWSKLLRHQRIHTGERPNTCSECGKSFTQSSHLVQHQRTHTGEKPYKCPDCGKCFSWSSNLVQHQRTHTGEKPYKCTECEKAFTQSTNLIKHQRSHTGEKPYKCGECRRAFYRSSDLIQHQATHTGEKPYKCPECGKRFGQNHNLLKHQKIHAGEKPYRCTECGKSFIQSSELTQHQRTHTGEKPYECLECGKSFGHSSTLIKHQRTHLREDPFKCPVCGKTFTLSATLLRHQRTHTGERPYKCPECGKSFSVSSNLINHQRIHRGERPYICADCGKSFIMSSTLIRHQRIHTGEKPYKCSDCGKSFIRSSHLIQHRRTHTGEKPYKCPECGKSFSQSSNLITHVRTHMDENLFVCSDCGKAFLEAHELEQHRVIHERGKTPARRAQGDSLLGLGDPSLLTPPPGAKPHKCLVCGKGFNDEGIFMQHQRIHIGENPYKNADGLIAHAAPKPPQLRSPRLPFRGNSYPGAAEGRAEAPGQPLKPPEGQEGFSQRRGLLSSKTYICSHCGESFLDRSVLLQHQLTHGNEKPFLFPDYRIGLGEGAGPSPFLSGKPFKCPECKQSFGLSSELLLHQKVHAGGKSSQKSPELGKSSSVLLEHLRSPLGARPYRCSDCRASFLDRVALTRHQETHTQEKPPNPEDPPPEAVTLSTDQEGEGETPTPTESSSHGEGQNPKTLVEEKPYLCPECGAGFTEVAALLLHRSCHPGVSL

SEQ ID NO: 32323 - protein, 242 aa, Homo sapiens
TMCQQSMQKSSLEFHKANECQERPVECKFCKLDMQLSKLELHESYCGSRTELCQGCGQFIMHRMLAQHRDVCRSEQAQLGKGERISAPEREIYCHYCNQMIPENKYFHHMGKCCPDSEFKKHFPVGNPEILPSSLPSQAAENQTSTMEKDVRPKTRSINRFPLHSESSSKKAPRSKNKTLDPLLMSEPKPRTSSPRGDKAAYDILRRCSQCGILLPLPILNQHQVLSLCSLLTFLGTIRTVS

SEQ ID NO: 32324 - protein, 289 aa, Homo sapiens
ILHSIVKRDIQENDEEAVQVKEQSILELGSLLAKTGQAAELGGLLKYVRPFLNSISKAKAARLVRSLLDLFLDMEAATGQEVELCLECIEWAKSEKRTFLRQALEARLVSLYFDTKRYQEALHLGSQLLRELKKMDDKALLVEVQLLESKTYHALSNLPKARAALTSARTTANAIYCPPKLQATLDMQSGIIHAAEEKDWKTAYSYFYEAFEGYDSIDSPKAITSLKYMLLCKIMLNTPEDVQALVSGKLALRYAGRQTEALKCVAQASKNRSLADFEKVSMILGWYGM

SEQ ID NO: 32325 - protein, 128 aa, Homo sapiens
KNRSLADFEKALTDYRAELRDDPIISTHLAKLYDNLLEQNLIRVIEPFSRVQIEHISSLIKLSKADVERKLSQMILDKKFHGILDQGEGVLIIFDEPPVDKTYEAALETIQNMSKVVDSLYNKAKKLT

SEQ ID NO: 32326 - protein, 163 aa, Homo sapiens
TVLDVMRRLLQPKNVMVSTGRDRQTNHCYIAILNIIQGEVDPTQVHKSLQRIRERKLANFIPWGPASIQVALSRKSPYLPSAHRVSGLMMANHTSISSLFERTCRQYDKLRKREAFLEQFRKEDMFKDNFDEMDTSREIVQQLIDEYHAATRPDYISWGTQEQ

SEQ ID NO: 32327 - protein, 25 aa, Homo sapiens
MGFSRIDIGFLPNSLSWHLAKIKII

SEQ ID NO: 32328 - protein, 31 aa, Homo sapiens
LLEAAGAGPGSPALAVFAFGRGQSLLFQVPA

SEQ ID NO: 32329 - protein, 42 aa, Homo sapiens
LGKSPLSALARKKARLSLVIRSPSLLQSGAKKKAQVRKAGKP

SEQ ID NO: 32330 - protein, 425 aa, Homo sapiens
IPYSYSREYNEYENIKLERHVVSFDSSRPTSGKMNCDVCGLSCISFNVLMVHKRSHTGERPFQCNQCGASFTQKGNLLRHIKLHTGEKPFKCHLCNYACQRRDALTGHLRTHSVEKPYKCEFCGRSYKQRSSLEEHKERCRTFLQSTDPGDTASAEARHIKAEMGSERALVLDRLASNVAKRKSSMPQKFIGEKRHCFDVNYNSSYMYEKESELIQTRMMDQAINNAISYLGAEALRPLVQTPPAPTSEMVPVISSMYPIALTRAEMSNGAPQELEKKSIHLPEKSVPSERGLSPNNSGHDSTDTDSNHEERQNHIYQQNHMVLSRARNGMPLLKEVPRSYELLKPPPICPRDSVKVINKEGEVMDVYRCDHCRVLFLDYVMFTIHMGCHGFRDPFECNMCGYRSHDRYEFSSHIARGEHRALLK

SEQ ID NO: 32331 - protein, 767 aa, Homo sapiens
VKAPNTTTIQFPANLQLPPGTVLIKSNSGPLMLVSPQQTVTRAETTSNITSRPAVPANPQTVKICTVPNSSSQLIKKVAVTPVKKLAQIGTTVVTTVPKPSSVQSVAVPTSVVTVTPGKPLNTVTTLKPSSLGASSTPSNEPNLKAENSAAVQINLSPTMLENVKKCKNFLAMLIKLACSGSQSPEMGQNVKKLVEQLLDAKIEAEEFTRKLYVELKSSPQPHLVPFLKKSVVALRQLLPNSQSFIQQCVQQTSSDMVIATCTTTVTTSPVVTTTVSSSQSEKSIIVSGATAPRTVSVQTLNPLAGPVGAKAGVVTLHSVGPTAATGGTTAGTGLLQTSKPLVTSVANTVTTVSLQPEKPVVSGTAVTLSLPAVTFGETSGAAICLPSVKPVVSSAGTTSDKPVIGTPVQIKLAQPGPVLSQPAGIPQAVQVKQLVVQQPSGGNEKQVTTISHSSTLTIQKCGQKTMPVNTIIPTSQFPPASILKQITLPGNKILSLQASPTQKNRIKENVTSCFRDEDDINDVTSMAGVNLNEENACILATNSELVGTLIQSCKDEPFLFIGALQKRILDIGKKHDITELNSDAVNLISQATQERLRGLLEKLTAIAQHRMTTYKASENYILCSDTRSQLKFLEKLDQLEKQRKDLEEREMLLKAAKSRSNKEDPEQLRLKQKAKELQQLELAQIQHRDANLTALAAIGPRKKRPLESGIEGLKDNLLASGTSSLTATKQLHRPRITRICLRDLIFCMEQEREMKYSRALYLALLK

SEQ ID NO: 32332 - protein, 240 aa, Homo sapiens
LTTKRVFWKGVLEELLWFIKGSTNAKELSSKGVKIWDANGSRDFLDSLGFSTREEGDLGPVYGFQWRHFGAEYRDMESDYSGQGVDQLQRVIDTIKTNPDDRRIIMCAWNPRDLPLMALPPCHALCQFYVVNSELSCQLYQRSGDMGLGVPFNIASYALLTYMIAHITGLKPGDFIHTLGDAHIYLNHIEPLKIQLQREPRPFPKLRILRKVEKIDDFKAEDFQIEGYNPHPTIKMEMAV

SEQ ID NO: 32333 - protein, 570 aa, Homo sapiens
LEEWECLNPAQQNLYMNVMLENYKNLVFLAGIAVSKQDPITSLEQEKEPWNMKICEMVDESPAMCSSFTRDLWPEQDIKDSFQQVILRRHGKCEHENLQLRKGSANVVECKVYKKGYNELNQCLTTTQSKIFPCDKYIKVFHKIFNSNRHKTRHTGEKPFKCKKCDESFCMLLHLHQHKRIHIRENSYQCEECDKVFKRFSTLTRHKRVHTGEKPFKCEECGKAFKHSSTLTTHKMIHTGEKPYRCEECGKAFYHSSHLTTHKVIHTGEKPFKCEECGKAFNHPSALTTHKFIHVKEKPYKCEECDKAFNRFSYLTKHKIIHSGEKSYKCEQCGKGFNWSSTLTKHKRIHTGEKPYKCEECGKAFNVSSHLTTHKMIHTGEKPYKCEECGKAFNHSSKLTIHKIIHTGEKPYKCEECGKAFNQSSNLTKHKIIHTGEKLYKCEECGKAFNRSSNLTTHKRIHTGEKPYKCEECGKAFNRSSNLTKHNIIHTGEKSYKCEECGKAFNQSSTLTKHRKIQQGMVAHACNPNTLRGLGEQIARSGVQDQPGQHGKTPSLLKIQKFAGCGGRRL

SEQ ID NO: 32334 - protein, 644 aa, Homo sapiens
RMFESCSGFSGFCASPIEESHGALISSCNSRTMTDGLVTFRDVAIDFSQEEWECLDPAQRDLYVDVMLENYSNLVSLDLESKTYETKKIFSENDIFEINFSQWEMKDKSKTLGLEASIFRNNWKCKSIFEGLKGHQEGYFSQMIISYEKIPSYRKSKSLTPHQRIHNTEKSYVCKECGKACSHGSKLVQHERTHTAEKHFECKECGKNYLSAYQLNVHQRFHTGEKPYECKECGKTFSWGSSLVKHERIHTGEKPYECKECGKAFSRGYHLTQHQKIHTGVKSYKCKECGKAFFWGSSLAKHEIIHTGEKPYKCKECGKAFSRGYQLTQHQKIHTGKKPYECKICGKAFCWGYQLTRHQIFHTGEKPYECKECGKAFNCGSSLIQHERIHTGEKPYECKECGKAFSRGYHLSQHQKIHTGEKPFECKECGKAFSWGSSLVKHERVHTGEKSHECKECGKTFCSGYQLTRHQVFHTGEKPYECKECGKAFNCGSSLVQHERIHTGEKPYECKECGKAFSRGYHLTQHQKIHTGEKPFKCKECGKAFSWGSSLVKHERVHTNEKSYECKDCGKAFGSGYQLSVHQRFHTGEKLYQRKEFGKTFTCGSKLVHERTHSNDKPYKYNECGEAFLWTTYSNEKIDTDETL

SEQ ID NO: 32335 - protein, 67 aa, Homo sapiens
LQLKDMIPTEMQRLTKYPLLLQSIGQNTEEPTEREKVELAAECCREILHHVNQAVRDMEDLLVSPST

SEQ ID NO: 32336 - protein, 83 aa, Homo sapiens
LTCPTSEVTELPACSQCGGQRIFEFQLMPALVSMLKSANLGLSVEFGTILVYTCEKSCWPPNHQTPMEEFCIIQEDPDELLFK

SEQ ID NO: 32337 - protein, 65 aa, Homo sapiens
LLEGASQEQRQNLGLMTPDYYYYLNQSDTYQVDGTDDRSDFGETLVSTGLYSSPRPGRPQPQKPS

SEQ ID NO: 32338 - protein, 206 aa, Homo sapiens
MPAIAGCREAIKRIAYEFVEMKAKEGVVYVEVRYSPHLLANSKVEPIPWNQAEGDLTPDEVVALVGQGLQEGERDFGVKARSILCCMRHQPNWSPKVVELCKKYQQQTVVAIDLAGDETIPGSSLLPGHVQAYQEAVKSGIHRTVHAGEVGSAEVVKEVRAWAGHGVPPHCLLPYLALFCFSTGCGHTQDRAAGTRLPHPGRPGPL

SEQ ID NO: 32339 - protein, 35 aa, Homo sapiens
MNHDGYTDIKYRQLSRWATDASSNRVKDRTRSKLL

SEQ ID NO: 32340 - protein, 9 aa, Homo sapiens
LFCKKPSRY

SEQ ID NO: 32341 - protein, 38 aa, Homo sapiens
KTGMMTKMIEIGLIFTVGEGCICSSTQESPDVFLFSLN

SEQ ID NO: 32342 - protein, 95 aa, Homo sapiens
MHPVLSGELQPRSISVEGSSLLIGASNSLVADHLQRCGYEYSLSVFFPESGLAKEKVFTMQDLLQLIKINPTSSLYKSLVSGSDKENQKAIKSVT

SEQ ID NO: 32343 - protein, 608 aa, Homo sapiens
LPHFGPSRAPPPHFGLLRPPVVPVPLSPPRSPRAPGLVEMSEASGNLNSLRMANVALREELNALRGENANLGLQLGRALAEVNSLRGNVSSYIRWPVPIVPVLAEENLEFALSEIEVIPGGELPFLCRPPPRAEPDCISDDLLINVIQDRSTPDGPADPPLLPIPPPPALPPPASKEPPPQPPLAPLERPEIEPFSGDPVYLAEFLMQLETFIADHEVHFPGGAERVAFLISFFTGEAKDWAISVTQEGSPLHANFPRFLDEIRKEFCGPIPPRVAKKAIRKLKQGHCTLGSYADAFQFLAQFLSWDDCRLQNQFLKGLSEFFRKELLWSTEMADLDELILECVEIERKVRVPKPIPLPGVRNIIFPFAPSPNEEESEDEEYYSEDEDQEARRHRLHSKDQRKRMRAFQQEMKEKEEEEMKKEEEMKKKEEKEEEEEEEMKQKEEEEEIRNKNEEEGESKDEEDEDEDGGQKPEGEPQQDPGTEETYGEVEEEPLDEAQDDDLDELMEMEPTFVHASSQTSGPTSGYHAENFLGASPPIIQPSRRRNQNRVPLLEGLPGTNSPFYSSPQLIRRTGRLGQRQVRRRPPVLFRLTPRQGGHRAARGRIRV

SEQ ID NO: 32344 - protein, 49 aa, Homo sapiens
MREENMERIGEEVRQLMEKLREKQLSHSLRAVSTDPPHHDHHDEFCLMP

SEQ ID NO: 32345 - protein, 12 aa, Homo sapiens
VEFKLSTTCTST

SEQ ID NO: 32346 - protein, 1504 aa, Homo sapiens
MKLQEKGDTSQNEKLSMFYETLKSPLFNQILTLQQSIKQLKGQLNHIPSDCSANFDFSRKGLLVFTDGSITNGNVHRPSNNSTVSGLFPWTPKLGNEDFNSVIQQMAQGRQIEYIDIERPSTGGLGFSVVALRSQNLGKVDIFVKDVQPGSVADRDQRLKENDQILAINHTPLDQNISHQQAIALLQQTTGSLRLIVAREPVHTKSSTSSSLNDTTLPETVCWGHVEEVELINDGSGLGFGIVGGKTSGVVVRTIVPGGLADRDGRLQTGDHILKIGGTNVQGMTSEQVAQVLRNCGNSVRMLVARDPAGDISVTPPAPAALPVALPTVASKGPGSDSSLFETYNVELVRKDGQSLGIRIVGYVGTSHTGEASGIYVKSIIPGSAAYHNGHIQVNDKIVAVDGVNIQGFANHDVVEVLRNAGQVVHLTLVRRKTSSSTSPLEPPSDRGTVVEPLKPPALFLTGAVETETNVDGEDEEIKERIDTLKNDNIQALEKLEKVPDSPENELKSRWENLLGPDYEVMVATLDTQIADDAELQKYSKLLPIHTLRLGVEVDSFDGHHYISSIVSGGPVDTLGLLQPEDELLEVNGMQLYGKSRREAVSFLKEVPPPFTLVCCRRLFDDEASVDEPRRTETSLPETEVDHNMDVNTEEDDDGELALWSPEVKIVELVKDCKGLGFSILDYQDPLDPTRSVIVIRSLVADGVAERSGGLLPGDRLVSVNEYCLDNTSLAEAVEILKAVPPGLVHLGICKPLVEDNEEESCYILHSSSNEDKTEFSGTIHDINSSLILEAPKGFRDEPYFKEELVDEPFLDLGKSFHSQQKEIEQSKEAWEMHEFLTPRLQEMDEEREILVDEEYELYQDPSPSMELYPLSHIQEATPVPSVNELHFGTQWLHDNEPSESQEARTGRTVYSQEAQPYGYCPENVMKENFVMESLPSVPSTEGNSQQGRFDDLENLNSLAKTSLDLGMIPNDVQGPSLLIDLPVVAQRREQEDLPLYQHQATRVISKASAYTGMLSSRYATDTCELPEREEGEGEETPNFSHWGPPRIVEIFREPNVSLGISIVGGQTVIKRLKNGEELKGIFIKQVLEDSPAGKTNALKTGDKILEVSGVDLQNASHSEAVEAIKNAGNPVVFIVQSLSSTPRVIPNVHNKANKITGNQNQDTQEKKEKRQGTAPPPMKLPPPYKALTDDSDENEEEDAFTDQKIRQRYADLPGELHIIELEKDKNGLGLSLAGNKDRSRMSIFVVGINPEGPAAADGRMRIGDELLEINNQILYGRSHQNASAIIKTAPSKVKLVFIRNEDAVNQMAVTPFPVPSSSPSSIEDQSGTEPISSEEDGSVEVGIKQLPESESFKLAVSQMKQQKYPTKVSFSSQEIPLAPASSYHSTDADFTGYGGFQAPLSVDPATCPIVPGQEMIIEISKGRSGLGLSIVGGKDTPLVNGVDLRNSSHEEAITALRQTPQKVRLVVYRDEAHYRDEENLEIFPVDLQKKAGRGLGLSIVGKR

SEQ ID NO: 32347 - protein, 58 aa, Homo sapiens
MNNYDLGPGPSGIFTPNLNFITLERETVEWNDSPELQIEGIFSSDFDLNGGNTFMAPL

SEQ ID NO: 32348 - protein, 176 aa, Homo sapiens
MNPFWSMSTSSVRKRSEGEEKTLTGDVKTSPPRTAPKKQLPSIPKNALPITKPTSPAPAAQSTNGTHASYGPFYLEYSLLAEFTLVVKQKLPGVYVQPSYRSALMWFGVIFIRHGLYQDGVFKFTVYIPDNYPDGDCPVSWRHSLALFVDQREGLKGLTAFLVLFLTWYLYDLSTQ

SEQ ID NO: 32349 - protein, 327 aa, Homo sapiens
MLENRPRNIYGMVCYSCLLAPPNTKECVGATSGASANFPGTSGSSTLSPFQHAHKELSGQGHLATALIIAMSTIFIMAIAIVLIIMFYILKTKPSAPACCTSHPGKSVEAQVSKDEEKKEAPDNVVMFSEKDEFEKLTATPAKPTKSENDASSENEQLLSRSVDSDEEPAPDKQGSPELCLLSLVHLAREKSATSNKSAGIQSRRKKILDVYANVCGVVEGLSPTELPFDCLEKTSRMLSSTYNSEKAVVKTWRHLAESFGLKRDEIGGMTDGMQLFDRISTAGYSIPELLTKLVQIERLDAVESLCADILEWAGVVPPASQPHAAS

SEQ ID NO: 32350 - protein, 248 aa, Homo sapiens
MAVSEAVRQLWHEGPQYFYRGIYPPLLSKTLQGTLLFGTYDSLLCFLSPVGPHTLGHRWAAGLMSGVVEAVALSPFERVQNVLQDGRKQARFPSTFSILKEFNSYGLWGRLSLGYYRGFWPVLARNSLGSALYFSFKDPIQDGLAEQGLPHWVPALVSGSVNGTITCLVLYPLIVLVANMQSHIGWQNMPSLWASAQDVWNTRGRKLLLIYRGGSLVILRSSVTWGLTTAIHDFLQRKSHSRKELKTD

SEQ ID NO: 32351 - protein, 396 aa, Homo sapiens
LNDLRKQVKTLQETNMMYMHNTVSLEEELKKANAARTQLETYKRQVQDLHVKLSSESKRADTLAFEMKRLEEKHEALLKEKERLIEQRDTLKETNEELRCSQVQQDHLNQTDASATKSYENLAAEIMPVEYREVFIRLQHENKMLRLQQEGSENERIEELQEQLEQKHRKMNELETEQRLSKERIRELQQQIEDLQKSLQEQGSKSEGESSSKLKQKLEAHMEKLTEVHEELQKKQELIEDLQPDINQNVQKINELEAALQKKDEDMKAMEERYKMYLEKARNVIKTLDPKLNPASAEIMLLRKQLAEKERRIEILESECKVAKFRDYEEKLIVSAWYNKSLAFQKLGMESRLVSGGGACSDTGACTPARSFLAQQRHITNTRRNLSVKVPATTSD

SEQ ID NO: 32352 - protein, 331 aa, Homo sapiens
LVTGGVISGIGKGIIASSVGTILKSCGLHVTSIKIDPYINIDAGTFSPYEHGEVFVLDDGGEVDLDLGNYERFLDIRLTKDNNLTTGKIYQYVINKERKGDYLGKTVQVVPHITDAIQEWVMRQALIPVDEDGLEPQVCVIELGGTVGDIESMPFIEAFRQFQFKVKRENFCNIHVSLVPQPSSTGEQKTKPTQNSVRELRGLGLSPDLVVCRCSNPLDTSVKEKISMFCHVEPEQVICVHDVSSIYRVPLLLEEQGVVDYFLRRLDLPIERQPRKMLMKWKEMADRYDRLLETCSIALVGKYTKFSDSYASVIKALEHSALAINHKLEIK

SEQ ID NO: 32353 - protein, 87 aa, Homo sapiens
VLENHHLAVGFKLLQEEHCDIFMNLTKKQRQTLRKMVIDMVLATDMSKHMSLLADLKTMVETKKVTSSGVLLLDNYTDRIQVFEESL

SEQ ID NO: 32354 - protein, 137 aa, Homo sapiens
ISPMCDKHTASVEKSQVGFIDYIVHPLWETWADLVQPDAQDILDTLEDNRNWYQSMIPQSPSPPLDEQNRDCQGLMEKFQFELTLDEEDSEGPEKEGEGHSYFSSTKTLCVIDPENRDSLGETDIDIATEDKSPVDT

SEQ ID NO: 32355 - protein, 27 aa, Homo sapiens
IQRWMNYKRNLKLQDLRSFSPNLYLLW

SEQ ID NO: 32356 - protein, 29 aa, Homo sapiens
ILPVIQIIYPEVNSKASDGSYNTHRLSIY

SEQ ID NO: 32357 - protein, 435 aa, Homo sapiens
ICVAEDCNELPPRRNTEILTGSWSDQTYPEGTQAIYKCRPGYRSLGNVIMVCRKGEWVALNPLRKCQKRPCGHPGDTPFGTFTLTGGNVFEYGVKAVYTCNEGYQLLGEINYRECDTDGWTNDIPICEVVKCLPVTAPENGKIVSSAMEPDREYHFGQAVRFVCNSGYKIEGDEEMHCSDDGFWSKEKPKCVEISCKSPDVINGSPISQKIIYKENERFQYKCNMGYEYSERGDAVCTESGWRPLPSCEEKSCDNPYIPNGDYSPLRIKHRTGDEITYQCRNGFYPATRGNTAKCTSTGWIPAPRCTLKPCDYPDIKHGGLYHENMRRPYFPVAVGKYYSYYCDEHFETPSGSYWDHIHCTQDGWSPAVPCLRKCYFPYLENGYNQNHGRKFVQGKSIDVACHPGYALPKAQTTVTCMENGWSPTPRCIRVSFTL

SEQ ID NO: 32358 - protein, 242 aa, Homo sapiens
LQEKAYRDGLVEQLYDLTLEYLHSQAHCIGFPELVLPVVLQLKSFLRECKVANYCRQVQQLLGKVQENSAYICSRRQRVSFGVSEQQAVEAWEKLTREEGTPLTLYYSHWRKLRDREIQLEISGKERLEDLNFPEIKRRKMADRKDEDRKQFKDLFDLNSSEEDDTEGFSERGILRPLSTRHGVEDDEEDEEEGEEDSSNSEGEWSWDGDPDAEAGLAPGELQQLAQGPEDELEDLQLSEDD

SEQ ID NO: 32359 - protein, 59 aa, Homo sapiens
KVYYKDGKQLPNSYNLEKITVNSVSRDNSKYHCTAYRKFYILDIEVTSKPLNIQVQGNG

SEQ ID NO: 32360 - protein, 53 aa, Homo sapiens
LGSEFACGLRGTAAHEERSVSDRDFSKPGSARESTSKSAGGILINPALPGASW

SEQ ID NO: 32361 - protein, 17 aa, Homo sapiens
VKFKIGSCSLAATWFEM

SEQ ID NO: 32362 - protein, 40 aa, Homo sapiens
LRSRRHRLGALSWPLFPQMSDSDSRTEKRKKKRPNGKATF

SEQ ID NO: 32363 - protein, 23 aa, Homo sapiens
RPWRSCLNSVKHIQSTCIMIWNC

SEQ ID NO: 32364 - protein, 107 aa, Homo sapiens
REERLAQYESKKAKKPALVAKSSILLDVKPWDDETDMAKLEECVRSIQADGLVWGSSKLVPVGYGIKKLQIQCVVEDDKVGTDMLEEQITAFEDYVQSMDVAAFNKI

SEQ ID NO: 32365 - protein, 652 aa, Homo sapiens
KKVNRKTEIISGMNHMYEDNDKDVVHGLKKGNFFFKTQEDKEPISENIEVSKELQIPALSTRDNENQCDYRTQNVLGLQKQITNMYPVQQNESKVNKKLRQKVNRKTEIISEVNHLDNDKSIEYTVKSHSLFLTQKDKEIIPGNLEDPSEFETPALSTKDSGNLYDSEIQNVLGVKHGHDMQPACQNDSKIGKKPRLNVCQKSEIIPETNQIYENDNKGVHDLEKDNFFSLTPKDKETISENLQVTNEFQTVDLLIKDNGNLCDYDTQNILELKKYVTDRKSAEQNESKINKLRNKVNWKTEIISEMNQIYEDNDKDAHVQESYTKDLDFKVNKSKQKLECQDIINKHYMEVNSNEKESCDQILDSYKVVKKRKKESSCKAKNILTKAKNKLASQLTESSQTSISLESDLKHITSEADSDPGNPVELCKTQKQSTTTLNKKDLPFVEEIKEGECQVKKVNKMTSKSKKRKTSIDPSPESHEVMERILDSVQGKSTVSEQADKENNLENEKMVKNKPDFYTKAFRSLSEIHSPNIQDSSFDSVREGLVPLSVSSGKNVIIKENFALECSPAFQVSDDEHEKMNKMKFKVNRRTQKSGIGDRPLQDLSNTSFVSNNTAESENKSEDLSSERTSRRRRCTPFYFKEPSLRDKMRR

SEQ ID NO: 32366 - protein, 13 aa, Homo sapiens
IIELFLPFSCPFF

SEQ ID NO: 32367 - protein, 35 aa, Homo sapiens
IKMKQYSWTEDTEFLIPVGLVLFSVSYNCTWRNRY

SEQ ID NO: 32368 - protein, 34 aa, Homo sapiens
ISSGLVEVISPPESYYPDLTNLKETFGDSKERVR

SEQ ID NO: 32369 - protein, 68 aa, Homo sapiens [sequence omitted]

SEQ ID NO: 32370 - protein, 16 aa, Homo sapiens
VDEIKEFLHFLTDQFR

SEQ ID NO: 32371 - protein, 6 aa, Homo sapiens
MTKRNL

SEQ ID NO: 32372 - protein, 128 aa, Homo sapiens
LSLFCFFSLPHVGYLYMVVKSVELMSVYQYPEKSQQAVLTPQFLHVITSNNLQCFTVRCSAAAAREEDPYMDTTLKACPPVSMDVCALRIQLFIGLKAICHFKNHIILLTKAEPEAIPERRQSPKRLL

SEQ ID NO: 32373 - protein, 31 aa, Homo sapiens
IHEDTKEINEKSNILSNEMKAKNKDVKDTEK

SEQ ID NO: 32374 - protein, 16 aa, Homo sapiens
ILDVNIQIYPVDLGKY

SEQ ID NO: 32375 - protein, 42 aa, Homo sapiens
ITQAVIFLNTRRKVDWLTEKMHARDFTVSALVRGVLKCLDFH

SEQ ID NO: 32376 - protein, 173 aa, Homo sapiens
VELAANTKGICFIRTSRPENAIIYNNNEDFQVGQAKVVLKSKDDQVTVIGAGVTLHEALAAAELLKKGEEKGPPKSSTERPLHARSWGSFFRSFCSFLKSSQLERKHFISLNNDSNYSHPLSTCSVWHVAKSWGCSAHSPYPMTLKSRPPQHGGQISGLEPASWAGITQPGTS

SEQ ID NO: 32377 - protein, 9 aa, Homo sapiens
LPELQSRWG

SEQ ID NO: 32378 - protein, 23 aa, Homo sapiens
RALAPRRTKAARPRRRRPPGARR

SEQ ID NO: 32379 - protein, 891 aa, Homo sapiens
KQIWRQNQMLKQALLGDDLCEGAGGATWMATVVFLGQELSSALHQLLEHTSGTLRSTCQQLHVLLDKENQCVSRKEIITFIDCLIKITEHLGSTAALLKKEEKEICNLCGMHDECTPQQTMSSIQDTKAADIAARGELNVIETATVSPTNGEESHYTNQVQLEKNKTHMSSALVEKENNTSLNGRVLGQEESQNKMFPDNAENEDDKQIEHMTVENINGNREETHGIIQTTETEIQETSESPREEMTTSSIICDISKKYINSTLPNDSENIKHKNNIMEKEYLDVLSDVTGPQVSCYITAPSYVLQQLECRIINHMSSLIVGDNEELVSNVITIECSDKEKRVPFPIGIAIPFTARYRGNYRDIMVKVCDINLQSSYLNPNSLEGMKGGYKGTCASVKVYKLGIFSVVSCLKKESFTVTKKGLALKSSMDSRISLNYPPGVFTSPVLVQLKIQPVDPALVAHLKAQQDTFYSVQSTSPLIHIQHPSTYPFQKPVTLFLPCSPYLDKNNLGSEIDHKRRASATINRITPSYFNRTKIASIRKPRKNASECLKLLGFRSQDSGWCGLDDVVKTIQSGLVSVELYEHLERFIVLHLSSTMDNSHLVTFVKSLEEAMLSTTACIVLSHQKDNPHRIAVLVVPSKDLSQVLKDLHLEGFGGPPEPSRHFQVREGEQLLLRFTGNIFASSNGKDYGKDYTLIFHLQRKPRLELQIKEVDEFGNYSCPHYKGTIVVYKVPKGKIVPNLNQSLVINENHSQLPICKLPLKLPKHKKLINRPQSTKRVSKDPVEALWDNLLHWLAEELSEENAESLSSTLPLRRSTIQLIKLKNPDDLTEQIHEFLCFWKKSLPTFTDKLRLLARHLRKIGRSDLAEELKFKWENKVFTEPQQCFDVAPE

SEQ ID NO: 32380 - protein, 31 aa, Homo sapiens
ILPPTRPTDKPLCLPLQDVYKIGGIGTVPVG

SEQ ID NO: 32381 - protein, 47 aa, Homo sapiens
KHHKNLNIFLMQVRAVRPKVLMRLSKTKKHVSRAYGGSMCAKCVRDR

SEQ ID NO: 32382 - protein, 29 aa, Homo sapiens
MSTYANECTLCMKIREGGHNIKIIRNGPC

SEQ ID NO: 32383 - protein, 23 aa, Homo sapiens
RKSSHQARIPSNTLGWTRICQHG

SEQ ID NO: 32384 - protein, 36 aa, Homo sapiens
LESKDLLLFVNLPSFMYILEGMRPTSTMIIFICLFV

SEQ ID NO: 32385 - protein, 52 aa, Homo sapiens
MNNNMSLQDAEWYWGDISREEVNEKLRDTADGTFLVRDASTKMHGDYTLTLR

SEQ ID NO: 32386 - protein, 28 aa, Homo sapiens
IGRMSAQVPMNMTITGCMMTFYRYVMNM

SEQ ID NO: 32387 - protein, 32 aa, Homo sapiens
LRPSEWNRDTLPSNMYQKNGLHHGKRGLQSDI

SEQ ID NO: 32388 - protein, 52 aa, Homo sapiens
MEDSMDMDMSPLRPQNYLFGCELKADKDYHFKVDNDENEHQLSLRTVLKLSK

SEQ ID NO: 32389 - protein, 54 aa, Homo sapiens
TVSLGAGAKDELHIVEAEAMNYEGSPIKVTLATLKMSVQPTVRALTYFGCCVKV

SEQ ID NO: 32390 - protein, 162 aa, Homo sapiens
VKLLSISGKRSAPGGGSKVPQKKVKLAADEDDDDDDEEDDDEDDDDDDFDDEEAEEKAPVKKSIRDTPAKNAQKSNQNGKDSKPSSTPRSKGQESFKKQEKTPKTPKGPSSVEDIKAKMQASIEKGGSLPKVEAKFINYVKNCFRMTDQEAIQDLWQWRKSL

SEQ ID NO: 32391 - protein, 29 aa, Homo sapiens
MDGLSLSYGPVSPIIRRLWNIFVRNQEKI

SEQ ID NO: 32392 - protein, 38 aa, Homo sapiens
IHFIYQCSLISGLSLSYGPVSPIIRRLWNIFVRNQEKI

SEQ ID NO: 32393 - protein, 32 aa, Homo sapiens
VVQEYQEIKLETTLVGILQIEQESIHSKAYNQ

SEQ ID NO: 32394 - protein, 56 aa, Homo sapiens
KKTRIIPRHLQLAIRNDEELNKLLGKVTIAQGGVLPNIQAVLLPKKTESHHKAKGK

SEQ ID NO: 32395 - protein, 18 aa, Homo sapiens
MGYQRRTCDHPGRVLSES

SEQ ID NO: 32396 - protein, 7 aa, Homo sapiens
LCMCTRC

SEQ ID NO: 32397 - protein, 1215 aa, Homo sapiens
KTFLALINQVFPAEEDSKKDVEDNCSLMYLNEATLLHNIKVRYSKDRIYTYVANILIAVNPYFDIPKIYSSEAIKSYQGKSLGTRPPHVFAIADKAFRDMKVLKMSQSIIVSGESGAGKTENTKFVLRYLTESYGTGQDIDDRIVEANPLLEAFGNAKTVRNNNSSRFGKFVEIHFNEKSSVVGGFVSHYLLEKSRICVQGKEERNYHIFYRLCAGASEDIREKLHLSSPDNFRYLNRGCTRYFANKETDKQILQNRKSPEYLKAGSMKDPLLDDHGDFIRMCTAMKKIGLDDEEKLDLFRVVAGVLHLGNIDFEEAGSTSGGCNLKNKSAQSLEYCAELLGLDQDDLRVSLTTRVMLTTAGGTKGTVIKVPLKVEQANNARDALAKTVYSHLFDHVVNRVNQCFPFETSSYFIGVLDIAGFEYFEHNSFEQFCINYCNEKLQQFFNERILKEEQELYQKEGLGVNEVHYVDNQDCIDLIEAKLVGILDILDEENRLPQPSDQHFTSAVHQKHKDHFRLTIPRKSKLAVHRNIRDDEGFIIRHFAGAVCYETTQFVEKNNDALHMSLESLICESRDKFIRELFESSTNNNKDTKQKAGKLSFISVGNKFKTQLNLLLDKLRSTGASFIRCIKPNLKMTSHHFEGAQILSQLQCSGMVSVLDLMQGGYPSRASFHELYNMYKKYMPDKLARLDPRLFCKALFKALGLNENDYKFGLTKVFFRPGKFAEFDQIMKSDPDHLAELVKRVNHWLTCSRWKKVQWCSLSVIKLKNKIKYRAEACIKMQKTIRMWLCKRRHKPRIDGLVKVGTLKKRLDKFNEVVSVLKDGKPEMNKQIKNLEISIDTLMAKIKSTMMTQEQIQKEYDALVKSSEELLSALQKKKQQEEEAERLRRIQEEMEKERKRREEDEKRRRKEEEERRMKLEMEAKRKQEEEERKKREDDEKRIQAEVEAQLARQKEEESQQQAVLEQERRDRELALRIAQSEAELISDEAQADLALRRGPAVLATKAAAGTKKYDLSKWKYAELRDTINTSCDIELLAACREEFHRRLKVYHAWKSKNKKRNTETEQRAPKSVTDYAQQNPAAQIPARQREIEMNRQQRFFRIPFIRPADQYKDPQSKKKGWWYAHFDGPWIARQMELHPDKPPILLVAGKDDMEMCELNLEETGLTRKRGAEILPRQFEEIWERCGGIQYLQNAIESRQARPTYATAMLQSLLK

SEQ ID NO: 32398 - protein, 51 aa, Homo sapiens
IPRHLQLAIRNDEELNKLLGRVTIAQGGVLPNIQAVLLPKKTESHHKAKGK

SEQ ID NO: 32399 - protein, 6 aa, Homo sapiens
RSLVSR

SEQ ID NO: 32400 - protein, 16 aa, Homo sapiens
IASALGYLHSLNIVYR

SEQ ID NO: 32401 - protein, 28 aa, Homo sapiens
IYFSGRWSSSVEHMANDNGLTDQKQERT

SEQ ID NO: 32402 - protein, 12 aa, Homo sapiens
ICDDLIPNLNFC

SEQ ID NO: 32403 - protein, 825 aa, Homo sapiens
KWTSYQDGVRQFSGWMDSMEANLNESERQHAELRDKTTMLGKAKLLNEEVLSYSSLLETIEVKGAGMTEHYVTQLELQDLQERYRAIQERAKEAVTKSEKLVRLHQEYQRDLKAFEVWLGQEQEKLDQYSVLEGDAHTHETTLRDLQELQVHCAEGQALLNSVLHTREDVIPSGIPQAEDRALESLRQDWQAYQHRLSETRTQFNNVVNKLRLMEQKFQQVDEWLKTAEEKVSPRTRRQSNRATKEIQLHQMKKWHEEVTAYRDEVEEVGARAQEILDESHVNSRMGCQATQLTSRYQALLLQVLEQIKFLEEEIQSLEESESSLSSYSDWYGSTHKNFKNVATKIDKVDTVMMGKKLKTLEVLLKDMEKGHSLLKSAREKGERAVKYLEEGEAERLRKEIHDHMEQLKELTSTVRKEHMTLEKGLHLAKEFSDKCKALTQWIAEYQEILHVPEEPKMELYEKKAQLSKYKSLQQTVLSHEPSVKSVREKGEALLELVQDVTLKDKIDQLQSDYQDLCSIGKEHVFSLEAKVKDHEDYNSELQEVEKWLLQMSGRLVAPDLLETSSLETITQQLAHHKAMMEEIAGFEDRLNNLQMKGDTLIGQCADHLQAKLKQNVHAHLQGTKDSYSAICSTAQRMYQSLEHELQKHVSRQDTLQQCQAWLSAVQPDLEPSPQPPLSRAEAIKQVKHFRALQEQARTYLDLLCSMCDLSNASVKTTAKDIQQTEQTIEQKLVQAQNLTQGWEEIKHLKSELWIYLQDADQQLQNMKRRHSELELNIAQNMVSQVKVGINLPPREIKEANRVENLKCVQCIHFNMPECLSILRH

SEQ ID NO: 32404 - protein, 7 aa, Homo sapiens
VSAFLLA

SEQ ID NO: 32405 - protein, 73 aa, Homo sapiens
IGVKDGRGIITDSFGRHRRALSTTSSSTTNGNRATGSSDDRSAPSEGDEWDRMISDISSDIEALGCSMDQDSA

SEQ ID NO: 32406 - protein, 724 aa, Homo sapiens
LECVIILNGILYALPESERKLQSSIQDLCVTWWEKGLPAKEDTGKTAFVMLLRRSLETKTGADVCRLWRIHQALYCFDYDLEESGEIKDMLLECFININYIKKEEGRRFLSCLFNWNINFIKMIHGTIKNQLQGLQKSLMVYIAEIYFRAWKKASGKILEAIENDCIQDFMFHGIHLPRRSPVHSKVREVLSYFHHQKKVRQGVEEMLYRLYKPILWRGLKARNSEVRSNAALLFVEAFPIRDPNLHAIEMDSEIQKQFEELYSLLEDPYPMVRSTGILGVCKITSKYWEMMPPTILIDLLKKVTGELAFDTSSADVRCSVFKCLPMILDNKLSHPLLEQLLPALRYSLHDNSEKVRVAFVDMLLKIKAVRAAKFWKICPMEHILVRLETDSRPVSRRLVSLIFNSFLPVNQPEEVWCERCVTLVQMNHAAARRFYQYAHEHTACTNIAKLIHVIRHCLNACIQRAVREPPEDEEEEDGREKENVTVLDKTLSVNDVACMAGLLEIIVILWKSIDRSMENNKEAKLYTINKFASVLPEYLKVFKDDRCKIPLFMLMSFMPASAVPPFSCGVISTLRSREEGAVDKSYCTLLDCLCSWGQVGHILELVDNWLPTEHAQAKSNTASKGRVQIHDTRPVKPELALVYIEYLLTHPKNRECLLSAPRKKLNHLLKALETSKADLESLLQTPGGKPRGFSEAAAPRAFGLHCRLSIHLQHKVCLLLALY

SEQ ID NO: 32407 - protein, 178 aa, Homo sapiens
IDVVSVEKRQAPGKRSESGSPSAGGHSKPPHSPLVLKRCHVSTHQHNYAAPPSTRKDYPAAKRVKLDSVRVLRQISNNRKCTSPRSSDTEENVKRRTHNVLERQRRNELKRSFFALRDQIPELENNEKAPKVVILKKATAYILSVQAEEQKLISEEDLLRKRREQLKHKLEQLRNSCA

SEQ ID NO: 32408 - protein, 1008 aa, Homo sapiens
KRTASTDLKQLNQVNFTLPKKEGLSFLGGLRSKNDVLSRSNVCINGNHVYLEQPEAKGEIKDSSPSSSPSPKGFRKKHLFSSTENLAAGSWKEPAEGGGLSSDRQLSESSTKDSLKSMTLPSYRPAPLVSGDLRENMAPANSEATKEAKESKKPESRRSSLLSLMTGKKDVAKGSEGENPLTVPGREKEGMLMGVKPGEDASGPAEDLVRRSEKDTAAVVSRQGSSLNLFEDVQITEPEAEPESKSEPRPPISSPRAPQTRAVKPRLEVSPEAQPTARLPSPTDSPSSLPPLPSSSGQASVPSELGHGADTQSSESPSVFSSLSSPIAAPISTSTPIESWPLVDRGQAKSEGPPLLPKAELQTESLTPVPNSGSSALGSLFKQPSFPANKGTEDSLMGRTRETGTEKNTSSLELEESLPEQPETGRQEEELPRFPCKKQDYSPSSGEAQEVPFALSLSSDGAVSPVGELAAGGDRDLESQAGSLVESKARDAAEEVAPPLPMGASVPSIDSMMRKLEEMGLNLRKDQKKTKKRVSFSEQLFTEEAVAGAALLVEGHSSCPQELNPAWSVAGNASDGEPPESPHAEDSERESVTTPGPATCGAPASPADHLLLPSQEESFSEVPMSEASSAKDTPLFRMEGEDALVTQYQSKASDHEGLLSDPLSDLQLVSDFKSPIMADLNLSLPSIPEVASDDERIDQVEDDGDQVEDDGETAKSSTLDIGALSLGLVVPCPERGKGPSGEADRLVLGEGLCDFRLQAPQASVTAPSEQTTEFGIHKPHLGKSSSLDKQLPGPSGGEEEKPMGNGSPSPPPGTSLDNPVPSPSPSEIFPVTHSFPSSAHSDTHHTSTAESQKKATAEGSAGRVENFGKRKPLLQAWVSPSETHPVSAQPGAGTGSAKHRLHPVKPMNAMATKVANCSLGTATIISENLNNEVMMKKYSPSDPAFAYAQLTHDELIQLVLKQKETISKKEFQVRELEDYIDNLLVRVMEETPNILRIPTQVGKKAGKM

SEQ ID NO: 32409 - protein, 18 aa, Homo sapiens
LLFQLSSSLITYNVVRLH

SEQ ID NO: 32410 - protein, 60 aa, Homo sapiens
KHRKGAARLRAVDFAERHGYIKGIVKVVFRDPYRFKKRTELFIAAEGIHTGQFVYCGKKG

SEQ ID NO: 32411 - protein, 50 aa, Homo sapiens [sequence omitted]

SEQ ID NO: 32412 - protein, 2709 aa, Homo sapiens
KKIIKEQPQPSGKQESGSEIHVEVKAQSLVISPPAPSPRKTPVASDQRRRSCKTAPASSSKSQTEVPKRGGRKSGNLPSKRVSISRSQHDILQMICSKRRSGASEANLIVAKSWADVVKLGAKQTQTKVIKHGPQRSMNKRQRRPATPKKPVGEVHSQFSTGHANSPCTIIIGKAHTEKVHVPARPYRVLNNFISNQKMDFKEDLSGIAEMFKTPVKEQPQLTSTCHIAISNSENLLGKQFQGTDSGEEPLLPTSESFGGNVFFSAQNAAKQPSDKCSASPPLRRQCIRENGNVAKTPRNTYKMTSLETKTSDTETEPSKTVSTANRSGRSTEFRNIQKLPVESKSEETNTEIVECILKRGQKATLLQQRREGEMKEIERPFETYKENIELKENDEKMKAMKRSRTWGQKCAPMSDLTDLKSLPDTELMKDTARGQNLLQTQDHAKAPKSEKGKITKMPCQSLQPEPINTPTHTKQQLKASLGKVGVKEELLAVGKFTRTSGETTHTHREPAGDGKSIRTFKESPKQILDPAARVTGMKKWPRTPKEEAQSLEDLAGFKELFQTPGPSEESMTDEKTTKIACKSPPPESVDTPTSTKQWPKRSLRKADVEEEFLALRKLTPSAGKAMLTPKPAGGDEKDIKAFMGTPVQKLDLAGTLPGSKRQLQTPKEKAQALEDLAGFKELFQTPGHTEELVAAGKTTKIPCDSPQSDPVDTPTSTKQRPKRSIRKADVEGELLACRNLMPSAGKAMHTPKPSVGEEKDIIIFVGTPVQKLDLTENLTGSKRRPQTPKEEAQALEDLTGFKELFQTPGHTEEAVAAGKTTKMPCESSPPESADTPTSTRRQPKTPLEKRDVQKELSALKKLTQTSGETTHTDKVPGGEDKSINAFRETAKQKLDPAASVTGSKRHPKTKEKAQPLEDLAGLKELFQTPVCTDKPTTHEKTTKIACRSQPDPVDTPTSSKPQSKRSLRKVDVEEEFFALRKRTPSAGKAMHTPKPAVSGEKNIYAFMGTPVQKLDLTENLTGSKRRLQTPKEKAQALEDLAGFKELFQTRGHTEESMTNDKTAKVACKSSQPDPDKNPASSKRRLKTSLGKVGVKEELLAVGKLTQTSGETTHTHTEPTGDGKSMKAFMESPKQILDSAASLTGSKRQLRTPKGKSEVPEDLAGFIELFQTPSHTKESMTNEKTTKVSYRASQPDLVDTPTSSKPQPKRSLRKADTEEEFLAFRKQTPSAGKAMHTPKPAVGEEKDINTFLGTPVQKLDQPGNLPGSNRRLQTRKEKAQALEELTGFRELFQTPCTDNPTTDEKTTKKILCKSPQSDPADTPTNTKQRPKRSLKKADVEEEFLAFRKLTPSAGKAMHTPKAAVGEEKDINTFVGTPVEKLDLLGNLPGSKRRPQTPKEKAKALEDLAGFKELFQTPGHTEESMTDDKITEVSCKSPQPDPVKTPTSSKQRLKISLGKVGVKEEVLPVGKLTQTSGKTTQTHRETAGDGKSIKAFKESAKQMLDPANYGTGMERWPRTPKEEAQSLEDLAGFKELFQTPDHTEESTTDDKTTKIACKSPPPESMDTPTSTRRRPKTPLGKRDIVEELSALKQLTQTTHTDKVPGDEDKGINVFRETAKQKLDPAASVTGSKRQPRTPKGKAQPLEDLAGLKELFQTPICTDKPTTHEKTTKIACRSPQPDPVGTPTIFKPQSKRSLRKADVEEESLALRKRTPSVGKAMDTPKPAGGDEKDMKAFMGTPVQKLDLPGNLPGSKRWPQTPKEKAQALEDLAGFKELFQTPGTDKPTTDEKTTKIACKSPQPDPVDTPASTKQRPKRNLRKADVEEEFLALRKRTPSAGKAMDTPKPAVSDEKNINTFVETPVQKLDLLGNLPGSKRQPQTPKEKAEALEDLVGFKELFQTPGHTEESMTDDKITEVSCKSPQPESFKTSRSSKQRLKIPLVKVDMKEEPLAVSKLTRTSGETTQTHTEPTGDSKSIKAFKESPKQILDPAASVTGSRRQLRTRKEKARALEDLVDFKELFSAPGHTEESMTIDKNTKIPCKSPPPELTDTATSTKRCPKTRPRKEVKEELSAVERLTQTSGQSTHTHKEPASGDEGIKVLKQRAKKKPNPVEEEPSRRRPRAPKEKAQPLEDLAGFTELSETSGHTQESLTAGKATKIPCESPPLEVVDTTASTKRHLRTRVQKVQVKEEPSAVKFTQTSGETTDADKEPAGEDKGIKALKESAKQTPAPAASVTGSRRRPRAPRESAQAIEDLAGFKDPAAGHTEESMTDDKTTKIPCKSSPELEDTATSSKRRPRTRAQKVEVKEELLAVGKLTQTSGETTHTDKEPVGEGKGTKAFKQPAKRKLDAEDVIGSRRQPRAPKEKAQPLEDLASFQELSQTPGHTEELANGAADSFTSAPKQTPDSGKPLKISRRVLRAPKVEPVGDVVSTRDPVKSQSKSNTSLPPLPFKRGGGKDGSVTGTKRLRCMPAPEEIVEELPASKKQRVAPRARGKSSEPVVIMKRSLRTSAKRIEPAEELNSNDMKTNKEEHKLQDSVPENKGISLRSRRQNKTEAEQQITEVFVLAERIEINRNEKKPMKTSPEMDIQNPDDGARKPIPRDKVTENKRCLRSARQNESSQPKVAEESGGQKSAKVLMQNQKGKGEAGNSDSMCLRSRKTKSQPAASTLESKSVQRVTRSVKRCAENPKKAEDNVCVKKIRTRSHRDSEDI

SEQ ID NO: 32413 - protein, 8 aa, Homo sapiens
KQAFNQPD

SEQ ID NO: 32414 - protein, 92 aa, Homo sapiens
VQISKKRKFVADGIFKAELNEFLTRELAEDGYSGVEVRVTPTRTEIIILATRTQNVLGEKGRRIRELTAVVQKRFGFPEGSVEVSDSGICQR

SEQ ID NO: 32415 - protein, 17 aa, Homo sapiens
LRFLLLMRTLSAYAKKF

SEQ ID NO: 32416 - protein, 59 aa, Homo sapiens
KLFLDDRDLLPRAEPSADLLVNLSRCRRLIVVLSDAFLSRAWCSHSFRWVPRGVGWAPA

SEQ ID NO: 32417 - protein, 9 aa, Homo sapiens
IDQFLVVAR

SEQ ID NO: 32418 - protein, 34 aa, Homo sapiens [sequence omitted]

SEQ ID NO: 32419 - protein, 45 aa, Homo sapiens
LGAGAVAYGVRESVFTVEGGHRAIFFNRIGGVQQDTILAEGLHFR

SEQ ID NO: 32420 - protein, 38 aa, Homo sapiens
KVEKKKKEKVLATVTKPVGGDKNGGTRVVKLRKMDAEA

SEQ ID NO: 32421 - protein, 11 aa, Homo sapiens
LQKWKEQNVRV

SEQ ID NO: 32422 - protein, 15 aa, Homo sapiens
IFTESKRKLEMIGSL

SEQ ID NO: 32423 - protein, 174 aa, Homo sapiens
KREEEEKKAEFERQRKIRQQEIEEKLIEEETARRVEELVAKRVEEELEKRKDEIEREVLRRVEEAKRIMEKQLLEELERQRQAELAAQKAREVTLGRLESRDSPWQNFQCWVLPPAQFRKRWNTDYLIPFSSKLNIAAKVNFLAYSEVLTDNLKVGSFYKTYSRILFDLMELAI

SEQ ID NO: 32424 - protein, 8 aa, Homo sapiens
MMTLLSTG

SEQ ID NO: 32425 - protein, 10 aa, Homo sapiens
LLICTLLNVP

SEQ ID NO: 32426 - protein, 18 aa, Homo sapiens
MMMIMTLMIFNRIKIEFF

SEQ ID NO: 32427 - protein, 301 aa, Homo sapiens
KDYFPEPVTVSWNSGALTSGVHTFPAVLQSSGLYSLSSVVTVPSSSLGTQTYICNVNHKPSNTKVDKKVEPKSCDKTHTCPPCPAPELLGGPSVFLFPPKPKDTLMISRTPEVTCVVVDVSHEDPEVKFNWYVDGVEVHNAKTKPREEQYNSTYRVVSVLTVLHQDWLNGKEYKCKVSNKALPAPIEKTISKAKGQPREPQVYTLPPSRDELTKNQVSLTCLVKGFYPSDIAVEWESNGQPENNYKTTPPVLDSDGSFFLYSKLTVDKSRWQQGNVFSCSVMHEALHNHYTQKSLSLSPGK

SEQ ID NO: 32428 - protein, 8 aa, Homo sapiens
LYEIVMAF

SEQ ID NO: 32429 - protein, 8 aa, Homo sapiens
RLEPLPSP

SEQ ID NO: 32430 - protein, 15 aa, Homo sapiens
KCLAAALIVLTESGR

SEQ ID NO: 32431 - protein, 18 aa, Homo sapiens
RPCRRMHLFSPQSDWNIG

SEQ ID NO: 32432 - protein, 110 aa, Homo sapiens
IRPIVRCPTVRYHTKVRAGRGFSLEELRVAGIHKKGDSSAEELKLATQLTGPVMPVRNVYKKEKARVITEEEKNFKAFASLRMARANARLFGIRAKRAKEAAEQDVEKKK

SEQ ID NO: 32433 - protein, 55 aa, Homo sapiens
VRMNVLADALKSINNAEKRGKRQVLIRPCSKVIVRFLTVMMKHGKSAAAVFYVFM

SEQ ID NO: 32434 - protein, 13 aa, Homo sapiens
KELIKEVYFFVVV

SEQ ID NO: 32435 - protein, 24 aa, Homo sapiens
VTSTATSSMDWLLPNSHTVGLFLT

SEQ ID NO: 32436 - protein, 314 aa, Homo sapiens
IPYFSTASASHSVPEAGPSLEEKFLVSCDISTSGQEQIKLNTSEVGHKALGPGSSKKYPSLMASNGVAVDGCVSGTTTAEAENTSDQNLSIEESGVGVFPSQDPAQPRMPPWIYNESLVPDAYKKILETTMTPTGIDTAKLYPILMSSGLPRETLGQIWALANRTTPGKLTKEELYTVLAMIAVTQRGVPAMSPDALNQFPAAPIPTLSGFSMTLPTPVSQPTVIPSGPAGSMPLSLGQPVMGINLVGPVGGAAAQASSGFIPTYPANQVVKPEEDDFQDFQDASKSGSLDDSFSDFQELPASSKTSNSQHGNR

SEQ ID NO: 32437 - protein, 46 aa, Homo sapiens
VAGFVRQRPLTPPLLAAGPGPWRFERFVVIRSRPSCSSGSCPSRGW

SEQ ID NO: 32438 - protein, 44 aa, Homo sapiens
KVLGSLARILQFLPGDCRGAASTVDYNCNMTLEELVACDNAAQK

SEQ ID NO: 32439 - protein, 18 aa, Homo sapiens
KFTYRGVDLDQLLDMSYA

SEQ ID NO: 32440 - protein, 146 aa, Homo sapiens
LFLDRLMKRRQESGYLIEEIGDVLLARFDGAEGSWFQKISSRFCSRQSFALEQLKAKQRKDPRFCAFVQEAESRPRCRRLQLKDMIPTEMQRLTKYPLLLQSIGQNTEEPTEREKVELAAECCREILHHVNQAVRDMEDLLVSPST

SEQ ID NO: 32441 - protein, 14 aa, Homo sapiens
IFSPTGSTLEDRGL

SEQ ID NO: 32442 - protein, 65 aa, Homo sapiens
LQQYYVKLKDSEKNRKLFDLLDVLEFNQVIIFVKSVQRCMALAQLLVEQNFPAIAIHRGMAQEER

SEQ ID NO: 32443 - protein, 76 aa, Homo sapiens
TLGAMPSKGPLQSVQVFGRKKTATAVAHCKRGNGLIKVNGRPLEMIEPRTLQYKVLGSGTGVEWMEDSWRQRCCSS

SEQ ID NO: 32444 - protein, 149 aa, Homo sapiens
VSPTFPEHLGCAGSRPESGLLNGCSMPSEKGPIKWVITDAEKNEYEKDSPRLTKTNPILYYMLQKGGNSVTSRETQDKDIWREASSAESVSQVTAKEELLPTAETKASFFNLRSPYNSHMGNNASRPHSANGEVYGLLGSVLTIKKESE

SEQ ID NO: 32445 - protein, 36 aa, Homo sapiens
KLPDGYEFKFPNRLNLEAINYMAADGDFKIKCVAFD

SEQ ID NO: 32446 - protein, 44 aa, Homo sapiens
LSLSLSLLALPTQQRRPPARNGLPGASSSSFPKLNCPVSDSDFS

SEQ ID NO: 32447 - protein, 24 aa, Homo sapiens
VFLPSVPTAACGSIYPFTPVPPHA

SEQ ID NO: 32448 - protein, 34 aa, Homo sapiens
IVGYVETPRGLRTFKTVFAEHISDECKRRFYKNW

SEQ ID NO: 32449 - protein, 65 aa, Homo sapiens
KLKMVVMNSLRVILQASPGKLLWRKFQIPRFMPARPCSLYTCTYKTRNRACEYTTSLKRTKRAPA

SEQ ID NO: 32450 - protein, 8 aa, Homo sapiens
IQKSTGAP

SEQ ID NO: 32451 - protein, 276 aa, Homo sapiens
TPFASSSDAFFSGTQQPPQGSVEDEGPKVRVLPERISLQSQEEAEKKKGKIPPPVPKKPSVLYLPLTSPTAQMEAYVAEPRLPLSPIITLEEDTKCPATGDDLQSLGQRVTSTPQADSEREASPLGSSVEPGTEEKSLISDKTAEWIAEDDDDVFVASRTTEDLFTVIHRSKRKLLGWKEPGEAFVGGRTSSHSPIKNTAESPISESTATAGSGSSANLDAGRNDDFKALLQKKGSKATPRSRPSAAELLKTTNPLARRIIAQFSKDYETTDNPST

SEQ ID NO: 32452 - protein, 13 aa, Homo sapiens
ISEENRKKLKWHE

SEQ ID NO: 32453 - protein, 61 aa, Homo sapiens
VPLLVLTPFRSVLVFRSDSLFFVAATEDPGVAMGRRPARCYRYCKNKPYPKSRFCRGVPGK

SEQ ID NO: 32454 - protein, 22 aa, Homo sapiens
KSRGRWRTLATTAMYSRVEPSG

SEQ ID NO: 32455 - protein, 95 aa, Homo sapiens
MDLVDGIFLNQIMLQIDPRPTNQRINKHVNNDVNLRIQNLTILVRNIKTYYQRWGDDYDEEGEEADEEGEEGGDEENDPDYDPKKDQNPTECKQQ

SEQ ID NO: 32456 - protein, 82 aa, Homo sapiens
MESSGRAGQRRLGPPLEGVLLFLLAPAALAGPSCGPFPQAGAAAALTHFLLQTARGPTCLPWLSMSLATPWAWATPQPPTPL

SEQ ID NO: 32457 - protein, 120 aa, Homo sapiens
MRWGAQPRAAQRPSWPAPDRAEDPWPWAWASASQDGAASVLGPSCPLGSRVLRPAPLAVGAVHSLPQARGRCSPQEEGAEAAGEAAGQCDGGGSGECQAVPGTRVGSAGHRPAFLAPSPY

SEQ ID NO: 32458 - protein, 23 aa, Homo sapiens
MSFLYSSKAGSHYATYTYSSDFL

SEQ ID NO: 32459 - protein, 946 aa, Homo sapiens
MEIVNVSCVSGAIPNNSTQGSSKEKQELLPCLQQDNNRPGILTSDIKTELESKELSATVAESMGLYMDSVRDADYSYEQQNQQGSMSPAKIYQNVEQLVKFYKGNGHRPSTLSCVNTPLRSFMSDSGSSVNGGVMRAVVKSPIMCHEKSPSVCSPLNMTSSVCSPAGINSVSSTTASFGSFPVHSPITQGTPLTCSPNVENRGSRSHSPAHASNVGSPLSSPLSSMKSSISSPPSHCSVKSPVSSPNNVTLRSSVSSPANINNSRCSVSSPSNTNNRSTLSSPAASTVGSICSPVNNAFSYTASGTSAGSSTLRDVVPSPDTQEKGAQEVPFPKTEEVESAISNGVTGQLNIVQYIKPEPDGAFSSSCLGGNSKINSDSSFSVPIKQESTKHSCSGTSFKGNPTVNPFPFMDGSYFSFMDDKDYYSLSGILGPPVPGFDGNCEGSGFPVGIKQEPDDGSYYPEASIPSSAIVGVNSGGQSFHYRIGAQGTISLSRSARDQSFQHLSSFPPVNTLVESWKSHGDLSSRRSDGYPVLEYIPENVSSSTLRSVSTGSSRPSKICLVCGDEASGCHYGVVTCGSCKVFFKRAVEGKCSWQHNYLCAGRNDCIIDKIRRKNCPACRLQKCLQAGMNLGARKSKKLGKLKGIHEEQPQQQQPPPPPPPPQSPEEGTTYIAPAKEPSVNTALVPQLSTISRALTPSPVMVLENIEPEIVYAGYDSSKPDTAENLLSTLNRLAGKQMIQVVKWAKVLPGFKNLPLEDQITLIQYSWMCLSSFALSWRSYKHTNSQFLYFAPDLVFNEEKMHQSAMYELCQGMHQISLQFVRLQLTFEEYTIMKVLLLLSTIPKDGLKSQAAFEEMRTNYIKELRKMVTKCPNNSGQSWQRFYQLTKLLDSMHDLVSDLLEFCFYTFRESHALKVEFPAMLVEIISDQLPKVESGNAKPLYFHRK

SEQ ID NO: 32460 - protein, 170 aa, Homo sapiens
MTRFLEEFEKNLEDTKMNGHLRLLNIACAAKAKWRQVVLQKASRESPLQFSLNGGSEKGFGIFVEGVEPGSKAADSGLKRGDQIMEVNGQNFENITFMKAVEILRNNTHLALTVKTNIFVFKELLFRTEQEKSGVPHIPKIAEKKSNRHSIQHVPGDIEQTSQEKGMMEA

SEQ ID NO: 32461 - protein, 65 aa, Homo sapiens
MQCTLSYSPSHWLKSSSGLTPIHQRRQDSPCWLLPALLTSAASYGSTLRRVPGCILCLPNSASWV

SEQ ID NO: 32462 - protein, 354 aa, Homo sapiens
MGFKAHFRKAQALATLGKVEEALREFLYCVSLDGKNKRARCEAQRLLLSFFSPSVPGDSQEHSPDILKLLAPHPRLKENVESMTTEVTSHNLPRLLQDNLELPHCSSQEEAAARGDGSSLMDPAKVKGDGQQHHMKDQEEEEEKWDATSPKAASSKTGKCQEKKRKHCQIESQEETGMPNKASKQDPPTDQGDKPALSLPLASFDASDLECALCMRLFYEPVTTPCGHTFCLKCLERCLDHNAKCPLCKDGLSQCLASRKYSKNVIMEELIAKFLPEELKERRKLYEEEMEELSNLNKNVPIFVCTMAYPTVPCPLHIFEPCYRLMIRRCIETGTRQFGMCLGDPVKGHCLLCN

SEQ ID NO: 32463 - protein, 112 aa, Homo sapiens
LNFPEIKRRKMADRKDEDRKQFKDLFDLNSSEEDDTEGFSERGILRPLSTRHGVEDDEEDEEEGEEDSSNSEGEWSWDGDPDAEAGLAPGELQQLAQGPEDELEDLQLSEDD

SEQ ID NO: 32464 - protein, 39 aa, Homo sapiens
IFTGLMIDPRTKALVLNGKPGHLQFYSLQSDKQLYNVRF

SEQ ID NO: 32465 - protein, 17 aa, Homo sapiens
VMTTISNGRDPRRAFKR

SEQ ID NO: 32466 - protein, 36 aa, Homo sapiens
IYFQTQRKVHGQFVGHLIQGPQFVRGEVGMQKYFDL

SEQ ID NO: 32467 - protein, 29 aa, Homo sapiens
KKQYKKWVELPITFPNLDYSECCLFSDED

SEQ ID NO: 32468 - protein, 12 aa, Homo sapiens
LPPRPPPPPPPL

SEQ ID NO: 32469 - protein, 43 aa, Homo sapiens
IHGLSDPSVTSEGCPGSWRFEQRIGQNSQTKQEKKEATKAEMY

SEQ ID NO: 32470 - protein, 17 aa, Homo sapiens
IHERSNSNSGEKGRIDP

SEQ ID NO: 32471 - protein, 745 aa, Homo sapiens
KKWLFQWKQLENLYFREKKFAVEVHDPRRISVSRRTFGQSGLFVQTWYANSSLIKSIWVMAISQHQFYLDRKQSKAKIPSARSLDEIAMDLTETGTQRASKLVTLETKSQFIMASNGSLISSGSQDSEVSEEQKREKILELKKKEKLLQEKLLKKVEELKKICLREAELTGKMPKEYPLNIGEKPPQVRRRVGTAFKLDDNLLPSEEDPALQELESNFLIQQKLVEAAKKLANEPDLCKTVKKKRKQDYTDAMKKLQEIENAINEYRIRCGKKPSQKATVLPEDIIPSESSSLSDTTTYDDPSDAFTFPGQRSSSVPHSPRILPPKSLGIERIHFRKSSINEQFVDTRQSREMLSTHSSPYKTLERRPQGGRSMPTTPVLTRNAYSSSHLEPESSSQHCRQRSGSLESQSHLLSEMDSDKPFFSLSKSQRSSSTEILDDGSSYTSQSSTEYYCVTPVTGPYYTTQTLDTRTRGRRRSKKQNVSTSNSGSMPNLAQKDSLRNGVYSKSQEPPSSSYYIAGYTPYAECDFYYSGGYVYENDTEGQYSVNPSYRSSAHYGYERQRDYSRSFHEDEVDRVPHNPYATLRLPRKAAAKSEHITKNIHKALVAEHLRGWYQRASGQKDQGHSPQTSFDSDRGSQRCLGFAGLQVPCSPSSRASSYSSVSSTNASGNWRTQLTIGLSDYETPAHSSYTSCYGNVYNPLPSPSRQYTEISQLDGTDGNQLEDNLESSEQRLFWHEDSKPGTLV

SEQ ID NO: 32472 - protein, 32 aa, Homo sapiens
RGGLKSQFDSHSSSLFKFWLDAKPWDMNNFHV

SEQ ID NO: 32473 - protein, 15 aa, Homo sapiens
VVTTEGRTELTPAYF

SEQ ID NO: 32474 - protein, 7 aa, Homo sapiens
LDMQMTV

SEQ ID NO: 32475 - protein, 31 aa, Homo sapiens
KYATSKHAKISTLPQLNSALVQDLAKAVAKV

SEQ ID NO: 32476 - protein, 51 aa, Homo sapiens
VERLFKNLSLIKKYIDGQKKKCGEERRRVNQFLDYLQEFLGVMNTEWIIES

SEQ ID NO: 32477 - protein, 27 aa, Homo sapiens
MFLEVGKCIGLLVKHVLGIIFSSLGND

SEQ ID NO: 32478 - protein, 15 aa, Homo sapiens
KSSLIKSPELSKKEF

SEQ ID NO: 32479 - protein, 849 aa, Homo sapiens
RRPWSVASARSLPRPPPAARSCLDQDLGLCERIAGPGEVTAAPPGEVTAAPPGEVLESTMAEQVLPQALYLSNMRKAVKIRERTPEDIFKPTNGIIHHFKTMHRYTLEMFRTCQFCPQFREIIHKALIDRNIQATLESQKKLNWCREVRKLVALKTNGDGNCLMHATSQYMWGVQDTDLVLRKALFSTLKETDTRNFKFRWQLESLKSQEFVETGLCYDTRNWNDEWDNLIKMASTDTPMARSGLQYNSLEEIHIFVLCNILRRPIIVISDKMLRSLESGSNFAPLKVGGIYLPLHWPAQECYRYPIVLGYDSHHFVPLVTLKDSGPEIRAVPLVNRDRGRFEDLKVHFLTDPENEMKEKLLKEYLMVIEIPVQGWDHGTTHLINAAKLDEANLPKEINLVDDYFELVQHEYKKWQENSEQGRREGHAQNPMEPSVPQLSLMDVKCETPNCPFFMSVNTQPLCHECSERRQKNQNKLPKLNSKPGPEGLPGMALGASRGEAYEPLAWNPEESTGGPHSAPPTAPSPFLFSETTAMKCRSPGCPFTLNVQHNGFCERCHNARQLHASHAPDHTRHLDPGKCQACLQDVTRTFNGICSTCFKRTTAEASSSLSTSLPPSCHQRSKSDPSRLVRSPSPHSCHRAGNDAPAGCLSQAARTPGDRTGTSKCRKAGCVYFGTPENKGFCTLCFIEYRENKHFAAASGKVSPTASRFQNTIPCLGRECGTLGSTMFEGYCQKCFIEAQNQRFHEAKRTEEQLRSSQRRDVPRTTQSTSRPKCARASCKNILACRSEELCMECQHPNQRMGPGAHRGEPAPEDPPKQRCRAPACDHFGNAKCNGYCNECFQFKQMYG

SEQ ID NO: 32480 - protein, 8 aa, Homo sapiens
IYSSSGSL

SEQ ID NO: 32481 - protein, 47 aa, Homo sapiens
ILKHFSVSRSRKRRQLPRHTERLTDTRFGKLCRHLWSSYCPKLYSCA

SEQ ID NO: 32482 - protein, 31 aa, Homo sapiens
RASLSQLSGALLVAAVSSEFLALSMRRLVVF

SEQ ID NO: 32483 - protein, 8 aa, Homo sapiens
MSLKSRSW

SEQ ID NO: 32484 - protein, 160 aa, Homo sapiens
KDSWDFEPYLEILNAALGDEIFLHSSWIKEYFTWAGFKDYNLVVRMIETDEDFNPFPGGYDYLVDFLDLSFPKERPQREHPYEEIHSRVDVIRHVVKNGLLWDELYIGFQTRLQRDPDIYHHLFWNHFQIKLPLTPPNWKSFLMCCEQNGPVILQECKTT

SEQ ID NO: 32485 - protein, 18 aa, Homo sapiens
VSRGCNCRQVSPRSHKFL

SEQ ID NO: 32486 - protein, 47 aa, Homo sapiens
LSFTPPLSAATAAAAAAAAAAARIAAAPSLARRRYLLGQVRSSPEIL

SEQ ID NO: 32487 - protein, 43 aa, Homo sapiens
IQSFPEHMANVELKKSLDEIQSILESFNDRLDQAEKKLSKLKI

SEQ ID NO: 32488 - protein, 27 aa, Homo sapiens
MKRRRRRKMMMRKKTTWKLRKKMESWS

SEQ ID NO: 32489 - protein, 18 aa, Homo sapiens
LLPHSYCNTPLLKKVFLD

SEQ ID NO: 32490 - protein, 53 aa, Homo sapiens
VPLHQVPYAVKGCFRFLPPAQVTVVGSYLLGTCIRPDINVDVALTMPRVRSRV

SEQ ID NO: 32491 - protein, 40 aa, Homo sapiens
LAHHLAQDPLFGSVCFSYTNGCHLKPSLLLRPRGERHTLG

SEQ ID NO: 32492 - protein, 257 aa, Homo sapiens
RGSSVEMLQDVIDVMKRSESWTLKKPKSVSKKLKSVFRVPDLSGMLQVLKELTDVQYYWVDVMLNPGSATSNVAISVDQRQVKTVRTCTFKNSNPCDFSAFGVFGCQYFSSGKYYWEVDVSGKIAWILGVHSKISSLNKRKSSGFAFDPSVNYSKVYSRYRPQYGYWVIGLQNTCEYNAFEDSSSSDPKVLTLFMAVPPCRIGVFLDYEAGIVSFFNVTNHGALIYKFSGCRFSRPAYPYFNPWNCLVPMTVCPPSS

SEQ ID NO: 32493 - protein, 6 aa, Homo sapiens
LQPPSS

SEQ ID NO: 32494 - protein, 130 aa, Homo sapiens
TLHEPANSSASQSTDLCDFSGDLDPAPNPPHFPSHVIKATFAYISNCHKTKLKSILEILSKSPDSYQKILLAICEQAAETNNVYKKHRILKIYHLFVSLLLKDIKSGLGGAWAFVLRDVIYTLIHYINQR

SEQ ID NO: 32495 - protein, 8 aa, Homo sapiens
KWKKVLVA

SEQ ID NO: 32496 - protein, 396 aa, Homo sapiens
TGCYYYWNTQTNEVTWELPQYLATQVQGLQHYQPSSVPGAETSFVVNTDIYSKEKTISVSSSKSGPVIAKREVKKEVNEGIQALSNSEEEKKGVAASLLAPLLPEGIKEEEERWRRKVICKEEPVSEVKETSTTVEEATTIVKPQEIMLDNIEDPSQEDLCSVVQSGESEEEEEQDTLELELVLERKKAELRALEEGDGSVSGSSPRSDISQPASQDGMRRLMSKRGKWKMFVRATSPESTSRSSSKTGRDTPENGETAIGAENSEKIDENSDKEMEVEESPEKIKVQTTPKVEEEQDLKFQIGELANTLTSKFEFLGINRQSISNFHVLLLQTETRIADWREGALNGNYLKRKLQDAAEQLKQYEINATPKGWSCHWDRYALFSPFHLSPLTSQT

SEQ ID NO: 32497 - protein, 17 aa, Homo sapiens
VDRKVAGHDSVQFAGSL

SEQ ID NO: 32498 - protein, 7 aa, Homo sapiens
LGSPWAL

SEQ ID NO: 32499 - protein, 395 aa, Homo sapiens
KMSGEDEQQEQTIAEDLVVTKYKMGGDIANRVLRSLVEASSSGVSVLSLCEKGDAMIMEETGKIFKKEKEMKKGIAFPTSISVNNCVCHFSPLKSDQDYILKEGDLVKIDLGVHVDGFIANVAHTFVVDVAQGTQVTGRKADVIKAAHLCAEAALRLVKPGNQNTQVTEAWNKVAHSFNCTPIEGMLSHQLKQHVIDGEKTIIQNPTDQQKKDHEKAEFEVHEVYAVDVLVSSGEGKAKDAGQRTTIYKRDPSKQYGLKMKTSRAFFSEVERRFDAMPFTLRAFEDEKKARMGVVECAKHELLQPFNVLYEKEGEFVAQFKFTVLLMPNGPMRITSGPFEPDLYKSEMEVQDAELKALLQSSASRKTQKKKKKKASKTAENATSGETLEENEAGD

SEQ ID NO: 32500 - protein, 111 aa, Homo sapiens
VTEETVYTCTGHPLKSDIANILDWMLNQDFTTAYRNITELKTLKGLALHDILTEIHLFVHRVDFPSSVRIHLLTKMADIEYRLSVGTNEKIQLSSLIAAFQVTRDLIVAEA

SEQ ID NO: 32501 - protein, 22 aa, Homo sapiens
INASAISTNTLTDMGSFDRRES

SEQ ID NO: 32502 - protein, 157 aa, Homo sapiens
IRALRAAPAGGFQNIACLRSNAMKHLPNFFYKGQLTKMFFLFPDPHFKRTKHKWRIISPTLLAEYAYVLRVGGLVYTITDVLELHDWMCTHFEEHPLFERVPLEDLSEDPVVGHLGTSTEEGKKVLRNGGKNFPAIFRRIQDPVLQAVTSQTSLPGH

SEQ ID NO: 32503 - protein, 52 aa, Homo sapiens
ISIPKKTTDTASVQNEAKLDEILKEIKSIKDTICNQDERISKLEQQMAKIAA

SEQ ID NO: 32504 - protein, 63 aa, Homo sapiens
RSQDLHCGACRALVDELEWEIAQVDPKKTIQMGSFRINPDGSQSVVEVTVTVPPNKVAHSGFG

SEQ ID NO: 32505 - protein, 37 aa, Homo sapiens
VWILLKERVRKKERNTNYPFLLALQHVMLPEFQLQLN

SEQ ID NO: 32506 - protein, 28 aa, Homo sapiens
LSPINFSLQTAASYPGECGLCVHQGGPH

SEQ ID NO: 32507 - protein, 55 aa, Homo sapiens
RDRERERERERDRGDRDRDRERDRERGRERDRRDTKRHSRSRSRSTPVRDRGGRR

SEQ ID NO: 32508 - protein, 54 aa, Homo sapiens
KEETTAAPTRAAFLRRCNQSCFCWPSSCCPGQMQGRSSGDMRPSPTPAPTWLIL

SEQ ID NO: 32509 - protein, 68 aa, Homo sapiens
KMGHQQLYWSHPRKFGQGSRSCRVCSNRHGLIRKYGLNMCRQCFRQYAKDIGFIKKDLSCLPWHCLWR

SEQ ID NO: 32510 - protein, 51 aa, Homo sapiens
LVLPEELDTETINNKVPPRGIIVSIICNMQSVGLNSTALKIALEFDKDRSD

SEQ ID NO: 32511 - protein, 40 aa, Homo sapiens
IQDLRLEDYGRYRCEVIDGLEDESGLVELELRGEMLTGTG

SEQ ID NO: 32512 - protein, 470 aa, Homo sapiens
LEDKGTSTELVKENQKLKQHLEEEKQKKHSFLSQRETLLTEAKMLKRELERERLVTTALRGELQQLSGSQLHGKSDSPNVYTEKKEIAILRERLTELERKLTFEQQRSDLWERLYVEAKDQNGKQGTDGKKKGGRGSHRAKNKSKETFLGSVKETFDAMKNSTKEFVRHHKEKIKQAKEAVKENLKKFSDSVKSTFRHFKDTTKNIFDEKGNKRFGATKEAAEKPRTVFSDYLHPQYKAPTENHHNRGPTMQNDGRKEKPVHFKEFRKNTNSKKCSPGHDCRENSHSFRKACSGVFDCAQQESMSLFNTVVNPIRMDEFRQIIQRYMLKELDTFCHWNELDQFINKFFLNGVFIHDQKLFTDFVNDVKDYLRNMKEYEVDNDGVFEKLDEYIYRHFFGHTFSPPYGPSRPDKKQRMVNIENSRHRKQEQKHLQPQPYKREGKWHKYGRTNGRQMANLEIELGQLPFDPQY

SEQ ID NO: 32513 - protein, 16 aa, Homo sapiens
KQWLRKSKEKSMSFAT

SEQ ID NO: 32514 - protein, 125 aa, Homo sapiens
LAVSRTDGTVEIYNLSANYFQEKFFPGHESRATEALCWAEGQRLFSAGLNGEIMEYDLQALNIKYAMDAFGGPIWSMAASPSGSQLLVGCEDGSVKLFQITPDKIQFERNFDRQKSKRHFSWGGK

SEQ ID NO: 32515 - protein, 24 aa, Homo sapiens
KAGPPGNGQPFKRSLVTSSSTWWH

SEQ ID NO: 32516 - protein, 22 aa, Homo sapiens
LGSEASEFCSLTSEKTSFPPIP

SEQ ID NO: 32517 - protein, 7 aa, Homo sapiens
LQKMSSF

SEQ ID NO: 32518 - protein, 271 aa, Homo sapiens
IDDFEIGRPLGKGKFGNVYLAREKKSHFIVALKVLFKSQIEKEGVEHQLRREIEIQAHLHHPNILRLYNYFYDRRRIYLILEYAPRGELYKELQKSCTFDEQRTATIMEELADALMYCHGKKVIHRDIKPENLLLGLKGELKIADFGWSVHAPSLRRKTMCGTLDYLPPEMIEGRMHNEKVDLWCIGVLCYELLVGNPPFESASHNETYRRIVKVDLKFPASVPMGAQDLISKLLRHNPSERLPLAQVSAHPWVRANSRRVLPPSALQSVA

SEQ ID NO: 32519 - protein, 9 aa, Homo sapiens
RSPRFRDQA

SEQ ID NO: 32520 - protein, 7 aa, Homo sapiens
IRSTAPG

SEQ ID NO: 32521 - protein, 33 aa, Homo sapiens
VDLGFQTDFRVYLHLRQTWLAFSESQSPIPAPT

SEQ ID NO: 32522 - protein, 75 aa, Homo sapiens
MLRPNPILARLLRAHGAPEPEGEDEKSGPCSSSSDSDSGDEGDEYDDIVVHSSRSQTRLPPTPASKPLPDDPRPV

SEQ ID NO: 32523 - protein, 23 aa, Homo sapiens
RQRRRRKRWTSRTRPRGSSAAAS

SEQ ID NO: 32524 - protein, 8 aa, Homo sapiens
VIGVFASN

SEQ ID NO: 32525 - protein, 23 aa, Homo sapiens
KPTTTPVEEQPCHQNRAKNGSPK

SEQ ID NO: 32526 - protein, 15 aa, Homo sapiens
LSLLRSSEGPSLEDL

SEQ ID NO: 32527 - protein, 134 aa, Homo sapiens
MRGHIKWQKTRFTRGKRRIVKNGDCIVAVCRLHSLALSLPPNLLFFLFKICASAVSPPGRIETLANTYPLHSFLSPCFGLVFWNERSLLFYKPLCISNVVSFRFLLDMLLKRELRVWTDCGTQTHTKTCLFSHP

SEQ ID NO: 32528 - protein, 122 aa, Homo sapiens
MECDLMETDILESLEDLGYKGPLLEDGALSQAVSAGASSPEFTKLCAWLVSELRVLCKLEENVQATNSPSEAEEFQLEVSGLLGEMNCPYLSLTSGDVTKRLLIQKNCLLLLIKGNISKSST

SEQ ID NO: 32529 - protein, 27 aa, Homo sapiens
MLMKWKEMADRFACNEELGVLASFTLL

SEQ ID NO: 32530 - protein, 148 aa, Homo sapiens
VGKYTKFSDSYASVIKALEHSALAINHKLEIKYIDSADLEPITSQEEPVRYHEAWQKLCSAHGVLVPGGFGVRGTEGKIQAIAWARNQKKPFLGVCLGMQLAVVEFSRNVLGWQDANSTEFDPTTSHPVGNSMETQTTWKRGTATDLR

SEQ ID NO: 32531 - protein, 336 aa, Homo sapiens
LPQPAPVTITATMSSEAETQQPPAAPPAAPALSAADTKPGTTGSGAGSGGPGGLTSAAPAGGDKKVIATKVLGTVKWFNVRNGYGFINRNDTKEDVFVHQTAIKKNNPRKYLRSVGDGETVEFDVVEGEKGAEAANVTGPGGVPVQGSKYAADRNHYRRYPRRRGPPRNYQQNYQNSESGEKNEGSESAPEGQAQQRRPYRRRRFPPYYMRRPYGRRPQYSNPPVQGEVMEGADNQGAGEQGRPVRQNMYRGYRPRFRRGPPRQRQPREDGNEEDKENQGDETQGQQPPQRRYRRNFNYRRRRPENPKPQDGKETKAADPPAENSSAPEAEQGGAE

SEQ ID NO: 32532 - protein, 70 aa, Homo sapiens
RFAGFRPLFQRPTKSPSPTPNSTPFGTMCGGWDPVAHPCRSCPSHARRRVFVVTPCCHLFSSLCEDLDWQ

SEQ ID NO: 32533 - protein, 8 aa, Homo sapiens
TGVLKAGC

SEQ ID NO: 32534 - protein, 98 aa, Homo sapiens
IRPGSAQQVKTGSLLNQPKAVLQKLAALSDHNPSAPRNSRNFVFHTLSPVKAEAAKESSKSQVKKRGPSFMTSPSPKHLKTDDSTSGLTRSIFKYLES

SEQ ID NO: 32535 - protein, 23 aa, Homo sapiens
IQKRFGPPQECFPRNSLFVSTNM

SEQ ID NO: 32536 - protein, 8 aa, Homo sapiens
KLNMMKSS

SEQ ID NO: 32537 - protein, 166 aa, Homo sapiens
ICSRRQRVSFGVSEQQAVEAWEKLTREEGTPLTLYYSHWRKLRDREIQLEISGKERLEDLNFPEIKRRKMADRKDEDRKQFKDLFDLNSSEEDDTEGFSERGILRPLSTRHGVEDDEEDEEEGEEDSSNSEDGDPDAEAGLAPGELQQLAQGPEDELEDLQLSEDD

SEQ ID NO: 32538 - protein, 21 aa, Homo sapiens
IMGTLMVLQQHCVKLGLLKNC

SEQ ID NO: 32539 - protein, 36 aa, Homo sapiens
VNTSHHGKSSQCLRLQNGFICPICSRCLHMPVLPNS

SEQ ID NO: 32540 - protein, 21 aa, Homo sapiens
ISKPLLSCYCMSLQAQYRASS

SEQ ID NO: 32541 - protein, 42 aa, Homo sapiens
LDGIFSEQVAMGYSHSLVIARDESETEKEKIKKLPEYNPRTL

SEQ ID NO: 32542 - protein, 53 aa, Homo sapiens
IIIFVPVPQLKSFQKIQVRLVRELEKKFSGKHVVFIAQVSVLLLQHVSVCEFC

SEQ ID NO: 32543 - protein, 32 aa, Homo sapiens
LLVRAGFKSMLQILVEACVELFRDLAVSSFPE

SEQ ID NO: 32544 - protein, 38 aa, Homo sapiens
VDDEYRWAGVEDPKVMITTSRDPSSRLKMFAKVLVSRE

SEQ ID NO: 32545 - protein, 51 aa, Homo sapiens
MSSFYSQILTSSYWIGSTLSKMQLTDCQRIQVVHQETWNYSKSKDPLALNC

SEQ ID NO: 32546 - protein, 12 aa, Homo sapiens
RRCCSFCAGMLL

SEQ ID NO: 32547 - protein, 29 aa, Homo sapiens
RAKLKKTETQEKNTLPTKETTGQKRSEIS

SEQ ID NO: 32548 - protein, 2621 aa, Homo sapiens
VALHALLLCEGLFDPYQTWRRQRSGEVISSKEKSKYKFPPAALPQEFSAFFQESLQNADHLPPILLLRLIHLFCAVLAGGKENGQMAVSDGSVKGLLSVVRGWSRGPAPDPCLVPLALEALVGAVHVLHASRAPPRGPELRALLESYFHVLNADWPAGLSSGPEEALVTLRVSMLDAIPMMLACEDRPVLQATFLSNNCFEHLTRLIQNSKLYLQSRAPPEGDSDLATRLLTEPDVQKVLDQDTDAIAVHVVRVLTCIMSDSPSAKEVFKERIGYPHLQEVLQSHGPPTHRLLQELLNMAVEGDHSMCPPPPIRNEQPVLVLAQWLPSLPTAELRLFLAQRLRWLCDSCPASRATCVQAGLVGCLLETLSTGLALEARCQEQLLALLQALGRVSIRPMELRHLLRPRPGLDSEPGGAEAGKARHAGAVIRTLSGMARHQGPARALRYFDLTPSMAGIMVPPVQRWPGPGFTFHAWLCLHPMDTAPTPAPTRPLQRKQLYSFFTSSGSGFEAFFTAAGTLVVAVCTRKEYLTMSLPEVSFADSAWHCVAIVHVPGRRPFSQNLVHVYKDGHLVKTAPLRCPSLSEPFSSCCIGSAGYRTTTTTTGLPTPPVPATLAYTHPALTRSQSVPASTGLGWGSGLVAPLQEGSIDSTLAGTQDTRWGSPTSLEGELGAVAIFHEALQATALRTLCTLGPNETAPFKPEGELHELSTRLLLHYSPQACKNNICLDLSPSHGLDGRLTGHRVETWDVKDVVNCVGGMGALLPLLERVAAQPKEAEAGPAETHDLVGPELTSGHNTQGLVLPLGKSSEERMERNAVAAFLLMLRNFLQGHMVNQESLVQCQGPAIIGALLRKVPSWAMDMNVLMSAQLLMEQVAAEGSGPLLYLLYQHLLFNFHLWTLSDFAVRLGHIQYMSSIVREHRQKLRKKYGVQFILDALRTHYSPQRERPLAADDLRTVQTSLLGLAREFLVRSLSADDVQVTQTMLSFLAATGDDGQAVGALDLLLALLHGSLVQESLAVFLLEPGNLEVLLALLVRPGSLPLLPDRVCKILRRLQQNERLPERSRQRLRLRECGLQGLVACLPEGTVSPQLCQGLYKLFLGADCLNLSDLLAVVQLSLQADLSVRLDICRQLFHLIYGQPDVVRLLARQAGWQDVLTRLYVLEAATAGSPPPSSPESPTSPKPAPPKPPTESPAEPSDVFLPSEAPCPDPDGFYHALSPFCTPFDLGLERSSVGSGNTAGGGGSSGTLTPASQPGTPSPLDGPRPFPAAPGRHSSSLSNVLEDGSLPEPTISGDDTSNTSNPQQTSEEELCNLLTNVLFSVTWRGVEGSDEAAWRERGQVFSVLTQLGASATLVRPPDCIKRSLLEMMLESALTDIKEAPVGVLASLTQQALWLLRLLQDFLCAEGHGNQELWSEKLFEGVCSLLDRLGAWPHLANGTADLREMAQIGLRLVLGYILLEDPQLHAQAYVRLHMLLQTAVPARREEACYVLSKLEAALGRVLNTSSLESATDEAGSPLAAAAAAAAAERCSWLVPLVRTLLDRAYEPLGLQWGLPSLPPTNGSPTFFEDFQAFCATPEWRHFIDKQVQPTMSQFEMDTYAKSHDLMSGFWNACYDMLMSSGQRRQWERAQSRRAFQELVLEPAQRRARLEGLRYTAVLKQQATQHSMALLHWGALWRQLASPCGAWALRDTPIPRWKLSSAETYSRMRLKLVPNHHFDPHLEASALRDNLGEVPLTPTEEASLPLAVTKEAKVSTPPELLQEDQLGEDELAELETPMEAAELDEQREKLVLSAECQLVTVVAVVPGLLEVTTQNVYFYDGSTERVETEEGIGYDFRRPLAQLREVHLRRFNLRRSALELFFIDQANYFLNFPCKVGTTPVSSPSQTPRPQPGPIPPHTQVRNQVYSWLLRLRPPSQGYLSSRSPQEMLRASGLTQKWVQREISNFEYLMQLNTIAGRTYNDLSQYPVFPWVLQDYVSPTLDLSNPAVFRDLSKPIGVVNPKHAQLVREKYESFEDPAGTIDKFHYGTHYSNAAGVMHYLIRVEPFTSLHVQLQSGRFDCSDRQFHSVAAAWQARLESPADVKELIPEFFYFPDFLENQNGFDLGCLQLTNEKVGDVVLPPWASSPEDFIQQHRQALESEYVSAHLHEWIDLIFGYKQRGPAAEEALNVFYYCTYEGAVDLDHVTDERERKALEGIISNFGQTPCQLLKEPHPTRLSAEEAAHRLARLDTNSPSIFQHLDELKAFFAEVVSDGVPLVLALVPHRQPHSFITQGSPDLLVTVSASGLLGTHSWLPYDRNISNYFSFSKDPTMGSHKTQRLLSGPWVPGSGVSGQALAVAPDGKLLFSGGHWDGSLRVTALPRGKLLSQLSCHLDVVTCLALDTCGIYLISGSRDTTCMVWRLLHQGGLSVGLAPKPVQVLYGHGAAVSCVAISTELDMAVSGSEDGTVIIHTVRRGQFVAALRPLGATFPGPIFHLALGSEGQIVVQSSAWERPGAQVTYSLHLYSVNGKLRASLPLAEQPTALTVTEDFVLLGTAQCALHILQLNTLLPAAPPLPMKVAIRSVAVTKERSHVLVGLEDGKLIVVVAGQPSEVRSSQFARKLWRSSRRISQVSSGETEYNPTEAR

SEQ ID NO: 32549 - protein, 41 aa, Homo sapiens
IPCSKRTFHLFNHSNFHSHLHDYRKHGVCRLVTHKKIAVRW

SEQ ID NO: 32550 - protein, 44 aa, Homo sapiens
LKVFTPEMKQNSIWARDALMYIKQRTTQSLLAANQTKPESSGEK

SEQ ID NO: 32551 - protein, 6 aa, Homo sapiens
MNNFHV

SEQ ID NO: 32552 - protein, 62 aa, Homo sapiens
IVIGNKRANDFWAGNLQKDEELHMDSPVEKRKNFITQKYKEGKFRKTLLASLTKEELNKVFN

SEQ ID NO: 32553 - protein, 15 aa, Homo sapiens
LANGKRMKIGLTSLS

SEQ ID NO: 32554 - protein, 154 aa, Homo sapiens
VLKHSLLSFKRRRAMETLKLYFLFSLQLLIKEDYLNKKGNPKKFAGLASYLHGHEPSNLVFVNFLKRGLFHNLCKPAWKGSQQFSQDVMEKLVLVLANLFGRKYIPAKFQNANLSFSQSKTQQQNNNKQTEPKKMCIRTWECRRSLFLSSNPSE

SEQ ID NO: 32555 - protein, 16 aa, Homo sapiens
LATLKEEKRYLQDIWS

SEQ ID NO: 32556 - protein, 30 aa, Homo sapiens
KSHIMAAKAVANTMRTSLGPNGKSPPFRVF

SEQ ID NO: 32557 - protein, 13 aa, Homo sapiens
LTKSKGEFAEILI

SEQ ID NO: 32558 - protein, 79 aa, Homo sapiens
LFSEFNINYNNELPMYRKGTVLIWQKVDEVMTKEIKLPTEMEGKKMAVTRTRTKPVPLHCDIIGDAFWKEHPEILDEDS

SEQ ID NO: 32559 - protein, 101 aa, Homo sapiens
ISLEYEAYLPMAENEVRKICSDIRQKWPVKHIAVFHRLGLVPVSEASIIIAVSSAHRAASLEAVSYAIDTLKAKVPIWKKEIYEESSTWKGNKECFWASNS

SEQ ID NO: 32560 - protein, 13 aa, Homo sapiens
LKYINVGDLAREV

SEQ ID NO: 32561 - protein, 178 aa, Homo sapiens
LETAVLYPSHSSFTMPGSLPLNAEACWPKDVGIVALEIYFPSQYVDQAELEKYDGVDAGKYTIGLGQAKMGFCTDREDINSLCMTVVQNLMERNNLSYDCIGRLEVGTETIIDKSKSVKTNLMQLFEESGNTDIEGIDTTNACYGGTAAVFNAVNWIESSSWDGMLHAYSPPSPKIFF

SEQ ID NO: 32562 - protein, 192 aa, Homo sapiens
LDDPYPLLVVNIGSGVSILAVHSKDNYKRVTGTSLGGGTFLGLCSLLTGCESFEEALEMASKGDSTQADKLVRDIYGGDYERFGLPGWAVASSFGNMIYKEKRESVSKEDLARATLVTITNNIGSVARMCAVNEKINRVVFVGNFLRVNTLSMKLLAYALDYWSKGQLKALFLEHEGYFGAVGALLGLPNFS

SEQ ID NO: 32563 - protein, 10 aa, Homo sapiens
ITYFLAPYIP

SEQ ID NO: 32564 - protein, 19 aa, Homo sapiens
LRVTTRPRASKTRTLILAF

SEQ ID NO: 32565 - protein, 8 aa, Homo sapiens
ISMAPAQG

SEQ ID NO: 32566 - protein, 94 aa, Homo sapiens
ILYSSPDVKELWLETLQGQRHSHTGVKSTPGQSAAILMKLRSSHNASKTLNANNMETLIECQSEGDIKEHPLLASCESEDSICQLIGHSHYSMP

SEQ ID NO: 32567 - protein, 33 aa, Homo sapiens
LYKNKSRLRACKNMCKHQGGLFIKDIEDLAGSC

SEQ ID NO: 32568 - protein, 449 aa, Homo sapiens
VFDPWLIGPAFARGWWLLHEPPSDWLERLCQADLIYISHLHSDHLSYPTLKKLAGRRPDIPIYVGNTERPVFWNLNQSGVQLTNINVVPFGIWQQVDKNLRFMILMDGVHPEMDTCIIVEYKGHKILNIVDCTRPNGGRLPMKVALMMSDFAGGASGFPMTFSGGKFTEEWKAQFIKTERKKLLNYKARLVKNLQPRIYCPFAGYFVESHPSDKYIKETNTKNDPNELNNLIKKNSDVITWTPRPGATLDLGRMLKDRTDSKGIIEPPEGTKIYKDSWDFEPYLEILNAALGDEIFLHSSWIKEYFTWAGFKDYNLVVRMIETDEDFNPFPGGYDYLVDFLDLSFPKERPQREHPYEEIHSRVDVIRHVVKNGLLWDELYIGFQTRLQRDPDIYHHLFWNHFQIKLPLTPPNWKSFLMCCEQNGPVILQFSTERTNEPNRNKFSVENKA

SEQ ID NO: 32569 - protein, 237 aa, Homo sapiens
MEAIELKLSESPEPGRSPESQMAEHQSFLQALMDEILMLQDEINELQSSLAEELVSESCEADPAEQLALQSTLTVLAERMSTIRMKASGKRQLLEEKLNDQLEEQRQEQALQRYRCEADELDSWLLSTKATLDTALSPPKEPMDMEAQLMDCQNMLVEIEQKVVALSELSVHNENLLLEGKAHTKDEAEQLAGKLRRLKGSLLELQRALHDKQLNMQVRVPAAGPQLKVGTLFTCSF

SEQ ID NO: 32570 - protein, 659 aa, Homo sapiens
LPPPTLLQDELLFLGGPASSAYALSPFSASGGWGRAGHLHPKGRELDPAAPPEGQLLREVRALGVPFVPRTSVDAWLVHSVAAGSADEAHGLLGAAAASSTGGAGASVDGGSQAVQGGGGDPRAARSGPLDAGEEEKAPAEPTAQVPDAGGCASEENGVLREKHEAVDHSSQHEENEERVSAQKENSLQQNDDDENKIAEKPDWEAEKTTESRNERHLNGTDTSFSLEDLFQLLSSQPENSLEGISLGDIPLPGSISDGMNSSAHYHVNFSQAISQDVNLHEAILLCPNNTFRRDPTARTSQSQEPFLQLNSHTTNPEQTLPGTNLTGFLSPVDNHMRNLTSQDLLYDLDINIFDEINLMSLATEDNFDPIDVSQLFDEPDSDSGLSLDSSHNNTSVIKSNSSHSVCDEGAIGYCTDHESSSHHDLEGAVGGYYPEPSKLCHLDQSDSDFHGDLTFQHVFHNHTYHLQPTAPESTSEPFPWPGKSQKIRSRYLEDTDRNLSRDEQRAKALHIPFSVDEIVGMPVDSFNSMLSRYYLTDLQVSLIRDIRRRGKNKVAAQNCRKRKLDIILNLEDDVCNLQAKKETLKREQAQCNKAINIMKQKLHDLYHDIFSRLRDDQGRPVNPNHYALQCTHDGSILIVPKELVASGHKKETQKGKRK

SEQ ID NO: 32571 - protein, 13 aa, Homo sapiens
KRILELHFLKHHS

SEQ ID NO: 32572 - protein, 41 aa, Homo sapiens
IEEFFPRMWKINQDKRRLMKSIKDQKIKIEWGKKLNRRLVR

SEQ ID NO: 32573 - protein, 27 aa, Homo sapiens
IDFHHVSAVLNFDLPPTPEAYIHRAGR

SEQ ID NO: 32574 - protein, 684 aa, Homo sapiens
KKQSVPVPVVSLEKIPNLVKADGANVKMNSTTTTAVSASSTSSSAVSTPPLIKPVLMSKSVPPSPEKILNGKGILPTTIDKKHQNGTKNSNKPYRRLSEREFDPNKHCGVLDPETKKPCTRSLTCKTHSLSHRRAVPGRKKQFDLLLAEHKAKSREKEVKDKEHLLTSTREILPSQSGPAQDSLLGSSGSSGPEPKVASPAKSRPPNSVLPRPSSANSISSSTSSNHSGHTPEPPLPPVGGDLASRLSSDEGEMDGADESEKLDCQFSTHHPRPLAFCSFGSRLMGRGYYVFDRRWDRFRFALNSMVEKHLNSQMWKKIPPAADSPLPSPAAHITTPVPASVLQPFSNPSAVYLPSAPISSRLTSSYIMTSAMLSNAAFVTSPDPSALMSHTTAFPHVAATLSIMDSTFKAPSAVSPIPAVIPSPSHKPSKTKTSKSSKVKDLSTRSDESPSNKKRKPQSSTSSSSSSSSSSLQTSLSSPLSGPHKKNCVLNASSALNSYQAAPPYNSLSVHNSNNGVSPLSAKLEPSGRTSLPGGPADIVRQVGAVGGSSDSCPLSVPSLALHAGDLSLASHNAVSSLPLSFDKSEGKKRKNSSSSSKACKITKMPGMNSVHKKNPPSLLAPVPDPVNSTSSRQVRDLLAPPSPALGGRGSWAAPLLSRAAPTGNTSLIPVLVFPEGSFHPLL

SEQ ID NO: 32575 - protein, 12 aa, Homo sapiens
IYARKPSSASSF

SEQ ID NO: 32576 - protein, 20 aa, Homo sapiens
RTRFSERLSLQLLRRWIFFG

SEQ ID NO: 32577 - protein, 7 aa, Homo sapiens
IIYRHQL

SEQ ID NO: 32578 - protein, 409 aa, Homo sapiens
KKPFSFHSDLVLNRKEKTAGEKSRKSNDGGKVLSHSSALTEHQKRQKIHLGDRSQKCSKCGIIFIRRSTLSRRKTPMCEKCRKDSCQEAALNKDEGNESGEKTHKCSKCGKAFGYSASLTKHRRIHTGEKPYMCNECGKAFSDSSSLTPHHRTHSGEKPFKCDDCGKGFTLSAHLIKHQRIHTGEKPYKCKDCGRPFSDSSSLIQHQRIHTGEKPYTCSNCGKSFSHSSSLSKHQRIHTGEKPYKCGECGKAFRQNSCLTRHQRIHTGEKPYLCNDCGMTFSHFTSVIYHQRLHSGEKPYKCNQCEKAFPTHSLLSRHQRIHTGVKPYKCKECGKSFSQSSSLNEHHRIHTGEKPYECNYCGATFSRSSILVEHLKIHTGRREYECNECEKTFKSNSGLIRHRGFHSAE

SEQ ID NO: 32579 - protein, 291 aa, Homo sapiens
IEKIGEGTYGVVYKGRHKTTGQVVAMKKIRLESEEEGVPSTAIREISLLKELRHPNIVSLQDVLMQDSRLYLIFEFLSMDLKKYLDSIPPGQYMDSSLVKSYLYQILQGIVFCHSRRVLHRDLKPQNLLIDDKGTIKLADFGLARAFGIPIRVYTHEVVTLWYRSPEVLLGSARYSTPVDIWSIGTIFAELATKKPLFHGDSEIDQLFRIFRALGTPNNEVWPEVESLQDYKNTFPKWKPGSLASHVKNLDENGLDLLSKMLIYDPAKRISGKMALNHPYFNDLDNQIKKM

SEQ ID NO: 32580 - protein, 23 aa, Homo sapiens
LRRMQLKLILWIEKLLELLYKVF

SEQ ID NO: 32581 - protein, 3181 aa, Homo sapiens
IDEPVRLKHGDVITIIDRSFRYENESLQNGRKSTEFPRKIREQEPARRVSRSSFSSDPDEKAQDSKAYSKITEGKVSGNPQVHIKNVKEDSTADDSKDSVAQGTTNVHSSEHAGRNGRNAADPISGDFKEISSVKLVSRYGELKSVPTTQCLDNSKKNESPFWKLYESVKKELDVKSQKENVLQYCRKSGLQTDYATEKESADGLQGETQLLVSRKSRPKSGGSGHAVAEPASPEQELDQNKGKGRDVESVQTPSKAVGASFPLYEPAKMKTPVQYSQQQNSPQKHKNKDLYTTGRRESVNLGKSEGFKAGDKTLTPRKLSTRNRTPAKVEDAADSATKPENLSSKTRGSIPTDVEVLPTETEIHNEPFLTLWLTQVERKIQKDSLSKPEKLGTTAGQMCSGLPGLSSVDINNFGDSINESEGIPLKRRRVSFGGHLRPELFDENLPPNTPLKRGEAPTKRKSLVMHTPPVLKKIIKEQPQPSGKQESGSEIHVEVKAQSLVISPPAPSPRKTPVASDQRRRSCKTAPASSSKSQTEVPKRGGRKSGNLPSKRVSISRSQHDILQMICSKRRSGASEANLIVAKSWADVVKLGAKQTQTKVIKHGPQRSMNKRQRRPATPKKPVGEVHSQFSTGHANSPCTIIIGKAHTEKVHVPARPYRVLNNFISNQKMDFKEDLSGIAEMFKTPVKEQPQLTSTCHIAISNSENLLGKQFQGTDSGEEPLLPTSESFGGNVFFSAQNAAKQPSDKCSASPPLRRQCIRENGNVAKTPRNTYKMTSLETKTSDTETEPSKTVSTANRSGRSTEFRNIQKLPVESKSEETNTEIVECILKRGQKATLLQQRREGEMKEIERPFETYKENIELKENDEKMKAMKRSRTWGQKCAPMSDLTDLKSLPDTELMKDTARGQNLLQTQDHAKAPKSEKGKITKMPCQSLQPEPINTPTHTKQQLKASLGKVGVKEELLAVGKFTRTSGETTHTHREPAGDGKSIRTFKESPKQILDPAARVTGMKKWPRTPKEEAQSLEDLAGFKELFQTPGPSEESMTDEKTTKIACKSPPPESVDTPTSTKQWPKRSLRKADVEEEFLALRKLTPSAGKAMLTPKPAGGDEKDIKAFMGTPVQKLDLAGTLPGSKRQLQTPKEKAQALEDLAGFKELFQTPGHTEELVAAGKTTKIPCDSPQSDPVDTPTSTKQRPKRSIRKADVEGELLACRNLMPSAGKAMHTPKPSVGEEKDIIIFVGTPVQKLDLTENLTGSKRRPQTPKEEAQALEDLTGFKELFQTPGHTEEAVAAGKTTKMPCESSPPESADTPTSTRRQPKTPLEKRDVQKELSALKKLTQTSGETTHTDKVPGGEDKSINAFRETAKQKLDPAASVTGSKRHPKTKEKAQPLEDLAGLKELFQTPVCTDKPTTHEKTTKIACRSQPDPVDTPTSSKPQSKRSLRKVDVEEEFFALRKRTPSAGKAMHTPKPAVSGEKNIYAFMGTPVQKLDLTENLTGSKRRLQTPKEKAQALEDLAGFKELFQTRGHTEESMTNDKTAKVACKSSQPDPDKNPASSKRRLKTSLGKVGVKEELLAVGKLTQTSGETTHTHTEPTGDGKSMKAFMESPKQILDSAASLTGSKRQLRTPKGKSEVPEDLAGFIELFQTPSHTKESMTNEKTTKVSYRASQPDLVDTPTSSKPQPKRSLRKADTEEEFLAFRKQTPSAGKAMHTPKPAVGEEKDINTFLGTPVQKLDQPGNLPGSNRRLQTRKEKAQALEELTGFRELFQTPCTDNPTTDEKTTKKILCKSPQSDPADTPTNTKQRPKRSLKKADVEEEFLAFRKLTPSAGKAMHTPKAAVGEEKDINTFVGTPVEKLDLLGNLPGSKRRPQTPKEKAKALEDLAGFKELFQTPGHTEESMTDDKITEVSCKSPQPDPVKTPTSSKQRLKISLGKVGVKEEVLPVGKLTQTSGKTTQTHRETAGDGKSIKAFKESAKQMLDPANYGTGMERWPRTPKEEAQSLEDLAGFKELFQTPDHTEESTTDDKTTKIACKSPPPESMDTPTSTRRRPKTPLGKRDIVEELSALKQLTQTTHTDKVPGDEDKGINVFRETAKQKLDPAASVTGSKRQPRTPKGKAQPLEDLAGLKELFQTPICTDKPTTHEKTTKIACRSPQPDPVGTPTIFKPQSKRSLRKADVEEESLALRKRTPSVGKAMDTPKPAGGDEKDMKAFMGTPVQKLDLPGNLPGSKRWPQTPKEKAQALEDLAGFKELFQTPGTDKPTTDEKTTKIACKSPQPDPVDTPASTKQRPKRNLRKADVEEEFLALRKRTPSAGKAMDTPKPAVSDEKNINTFVETPVQKLDLLGNLPGSKRQPQTPKEKAEALEDLVGFKELFQTPGHTEESMTDDKITEVSCKSPQPESFKTSRSSKQRLKIPLVKVDMKEEPLAVSKLTRTSGETTQTHTEPTGDSKSIKAFKESPKQILDPAASVTGSRRQLRTRKEKARALEDLVDFKELFSAPGHTEESMTIDKNTKIPCKSPPPELTDTATSTKRCPKTRPRKEVKEELSAVERLTQTSGQSTHTHKEPASGDEGIKVLKQRAKKKPNPVEEEPSRRRPRAPKEKAQPLEDLAGFTELSETSGHTQESLTAGKATKIPCESPPLEVVDTTASTKRHLRTRVQKVQVKEEPSAVKFTQTSGETTDADKEPAGEDKGIKALKESAKQTPAPAASVTGSRRRPRAPRESAQAIEDLAGFKDPAAGHTEESMTDDKTTKIPCKSSPELEDTATSSKRRPRTRAQKVEVKEELLAVGKLTQTSGETTHTDKEPVGEGKGTKAFKQPAKRKLDAEDVIGSRRQPRAPKEKAQPLEDLASFQELSQTPGHTEELANGAADSFTSAPKQTPDSGKPLKISRRVLRAPKVEPVGDVVSTRDPVKSQSKSNTSLPPLPFKRGGGKDGSVTGTKRLRCMPAPEEIVEELPASKKQRVAPRARGKSSEPVVIMKRSLRTSAKRIEPAEELNSNDMKTNKEEHKLQDSVPENKGISLRSRRQNKTEAEQQITEVFVLAERIEINRNEKKPMKTSPEMDIQNPDDGARKPIPRDKVTENKRCLRSARQNESSQPKVAEESGGQKSAKVLMQNQKGKGEAGNSDSMCLRSRKTKSQPAASTLESKSVQRVTRSVKRCAENPKKAEDNVCVKKIRTRSHRDSEDI

SEQ ID NO: 32582 - protein, 10 aa, Homo sapiens
VEWAATSWPK

SEQ ID NO: 32583 - protein, 30 aa, Homo sapiens
IKIIYLPEHEVEDHPATVLLSLDYMFTYCS

SEQ ID NO: 32584 - protein, 18 aa, Homo sapiens
LKDEDRIFTNLYGRHDWR

SEQ ID NO: 32585 - protein, 20 aa, Homo sapiens
VPRSAAGGAPQPPSWLRRSW

SEQ ID NO: 32586 - protein, 8 aa, Homo sapiens
TEVIQDQE

SEQ ID NO: 32587 - protein, 50 aa, Homo sapiens
LPRAEPSADLLVNLSRCRRLIVVLSDAFLSRAWCSHSFRWVPRGVGWAPA

SEQ ID NO: 32588 - protein, 104 aa, Homo sapiens
VLKMSTEEIIQRTRLLDSEIKIMKSEVLRVTHELQAMKDKIKENSEKIKVNKTLPYLVSNVIELLDVDPNDQEEDGANIDLDSQRKGKCAVIKTSTRQVSVAQQ

SEQ ID NO: 32589 - protein, 412 aa, Homo sapiens
LQRQLNLMKWTLCHRQNLPDRDVVRWASGGLALQGIYKASHQRGLTEKREELLSVPKEFLLLGPQQGTQMKTKEFTSPQAEFMFTQMVEKLGFRLTTSAKDGNWGFSLEAGLDHSKHPESKETQQSSSENSYFCSTKFSYIPLASCHFPIDQLQLSKPAVQELKCIEELLSQTTNPDRFSLLRHRIINFFHRFGSHVNQGPLHLGGIYWWKAISEGYCTEQLAEVRQQSAEALDIFIRDSYSGFGVKVAAGVNVSDSHSKTATQTKTSQNLQTKVQLSVAQTGGPPEADGLVQWKAGLIASNQTWCVIDRGLQLVPVWDIILSSHRSNFKDPLQVANFLKDSYTALTSITAQIQNGEELLSAGKEARVFLEDVKSWEVSDPEEQLKKLINFMKMLSQKLKSYDTWINICLTD

SEQ ID NO: 32590 - protein, 25 aa, Homo sapiens
LQERKIGIVQPENIQPPLQCQKSHG

SEQ ID NO: 32591 - protein, 12 aa, Homo sapiens
IQPPLQCQKSHG

SEQ ID NO: 32592 - protein, 18 aa, Homo sapiens
LQNFSFTPHPPPLPPFLF

SEQ ID NO: 32593 - protein, 23 aa, Homo sapiens
IVLFVHFIQLFVQNAKNLDTLHQ

SEQ ID NO: 32594 - protein, 12 aa, Homo sapiens
KSSSKDFHCSLT

SEQ ID NO: 32595 - protein, 15 aa, Homo sapiens
LISLIQELLISTSLA

SEQ ID NO: 32596 - protein, 53 aa, Homo sapiens
RALVDELEWEIAQVDPKKTIQMGSFRINPDGSQSVVEVTVTVPPNKVAHSGFG

SEQ ID NO: 32597 - protein, 52 aa, Homo sapiens
RALQELLTNRLSMVLHSRINCTSVCAKSTRHWRNSRNNTWYRHMDLSGKRSR

SEQ ID NO: 32598 - protein, 19 aa, Homo sapiens
ILQETLKWIWKLGSQLGSS

SEQ ID NO: 32599 - protein, 1412 aa, Homo sapiens
ILRSPRARRARRRRAVLAPAGLPGPSPPPGPEGRVIGRAAGRKGGREPPPPAPPPPLAPTPGRRARAARPEAPAMASPPRHGPPGPASGDGPNLNNNNNNNNHSVRKCGYLRKQKHGHKRFFVLRGPGAGGDEATAGGGSAPQPPRLEYYESEKKWRSKAGAPKRVIALDCCLNINKRADAKHKYLIALYTKDEYFAVAAENEQEQEGWYRALTDLVSEGRAAAGDAPPAAAPAASCSASLPGALGGSAGAAGAEDSYGLVAPATAAYREVWQVNLKPKGLGQSKNLTGVYRLCLSARTIGFVKLNCEQPSVTLQLMNIRRCGHSDSFFFIEVGRSAVTGPGELWMQADDSVVAQNIHETILEAMKALKELFEFRPRSKSQSSGSSATHPISVPGARRHHHLVNLPPSQTGLVRRSRTDSLAATPPAAKCSSCRVRTASEGDGGAAAGAAAAGARPVSVAGSPLSPGPVRAPLSRSHTLSGGCGGRGSKVALLPAGGALQHSRSMSMPVAHSPPAATSPGSLSSSSGHGSGSYPPPPGPHPPLPHPLHHGPGQRPSSGSASASGSPSDPGFMSLDEYGSSPGDLRAFCSHRSNTPESIAETPPARDGGGGGEFYGYMTMDRPLSHCGRSYRRVSGDAAQDLDRGLRKRTYSLTTPARQRPVPQPSSASLDEYTLMRATFSGSAGRLCPSCPASSPKVAYHPYPEDYGDIEIGSHRSSSSNLGADDGYMPMTPGAALAGSGSGSCRSDDYMPMSPASVSAPKQILQPRAAAAAAAAVPSAGPAGPAPTSAAGRTFPASGGGYKASSPAESSPEDSGYMRMWCGSKLSMEHADGKLLPNGDYLNVSPSDAVTTGTPPDFFSAALHPGGEPLRGVPGCCYSSLPRSYKAPYTCGGDSDQYVLMSSPVGRILEEERLEPQATPGPSQAASAFGAGPTQPPHPVVPSPVRPSGGRPEGFLGQRGRAVRPTRLSLEGLPSLPSMHEYPLPPEPKSPGEYINIDFGEPGARLSPPAPPLLASAASSSSLLSASSPASSLGSGTPGTSSDSRQRSPLSDYMNLDFSSPKSPKPGAPSGHPVGSLDGLLSPEASSPYPPLPPRPSASPSSSLQPPPPPPAPGELYRLPPASAVATAQGPGAASSLSSDTGDNGDYTEMAFGVAATPPQPIAAPPKPEAARVASPTSGVKRLSLMEQVSGVEAFLQASQPPDPHRGAKVIRADPQGGRRRHSSETFSSTTTVTPVSPSFAHNPKRHNSASVENVSLRKSSEGGVGVGPGGGDEPPTSPRQLQPAPPLAPQGRPWTPGQPGGLVGCPGSGGSPMRRETSAGFQNGLNYIAIDVREEPGLPPQPQPPPPPLPQPGDKSSWGRTRSLGGLISAVGVGSTGGGCGGPGPGALPPANTYASIDFLSHHLKEATIVKE

SEQ ID NO: 32600 - protein, 40 aa, Homo sapiens
RRTKSKLQICIDLCMMRCLVIDQMLLNPLIHRFYRKHVLH

SEQ ID NO: 32601 - protein, 31 aa, Homo sapiens
MEATLYRFLRLSLKRLAVPTSCHLGIIVLET

SEQ ID NO: 32602 - protein, 15 aa, Homo sapiens
LCIWACCMSCCRCLH

SEQ ID NO: 32603 - protein, 24 aa, Homo sapiens
ILMMVMMMMIMTLMIFNRIKIEFF

SEQ ID NO: 32604 - protein, 29 aa, Homo sapiens
IFCLAFNSGNTKVFSGGNDEQVILHDVER

SEQ ID NO: 32605 - protein, 1149 aa, Homo sapiens
VNPEEEDAVLKAFHSLDVNPTSQQDDSSNGLDPQEAGSRVSPDLGNDEKIASVETESEGSQRKEAGTSLLAQELLPLSTLKGTKDDVICVRGTLVHTTSDSDSDDGGQEPEEGSSTNGPKSPSGVLSEPSQESKENPGGFRENTVTGEMNGAELCAEDPQRIPPEMSSKLEAGNGGLQTERRPSQDQVGEEGSQDLPAVTNQNSSVGITESASSKKEVSGEKSFQLPAFFSGLRVLKKGATAEGGETITEIKPKDGDLALLKLTQPVQKSLVQAGLQTVKSEKKATDPKATPTLLEQLSLLLNIDMPKTEPKGADPESPRREEMGCNADQESQSGPGVPQTQGGEVKPKSPETALEAFKALFIRPPRKGTTADTSELEALKRKMRHEKESLRAVFERSNSKPADGPSDSKSPDHSLTEQDDRTPGRLQAVWPPPKTKDTEEKVGLKYTEAEYQAAILHLKREHKEEIENLQAQFELRAFHIRGEHAMITARLEETIENLKHELEHRWRGGCEERKDVCISTDDDCPPKTFRNVCVQTDRETFLKPCESESKTTRSNQLVPKKLNISSLSQLSPPNDHKDIHAALQPMEGMASNQQKALPPPPASIPPPPPLPSGLGSLSPAPPMPPVSAGPPLPPPPPPPPPLPPPSSAGPPPPPPPPPLPNSPAPPNPGGPPPAPPPPGLAPPPPPGLFFGLGSSSSQCPRKPAIEPSCPMKPLYWTRIQISDRSQNATPTLWDSLEEPDIRDPSEFEYLFSKDTTQQKKKPLSETYEKKNKVKKIIKLLDGKRSQTVGILISSLHLEMKDIQQAIFNVDDSVVDLETLAALYENRAQEDELVKIRKYYETSKEEELKLLDKPEQFLHELAQIPNFAERAQCIIFRSVFSEGITSLHRKVEIITRASKDLLHVKSVKDILALILAFGNYMNGGNRTRGQADGYSLEILPKLKDVKSRDNGINLVDYVVKYYLRYYDQEAGTEKSVFPLPEPQDFFLASQVKFEDLIKDLRKLKRQLEASEKQMVVVCKESPKEYLQPFKDKLEEFFQKAKKEHKMEESHLENAQKSFETTVRYFGMKPKSGEKEITPSYVFMVWYEFCSDFKTIWKRESKNISKERLKMAQESVSKLTSEKKVETKKINPTASLKERLRQKEASVTTN

SEQ ID NO: 32606 - protein, 21 aa, Homo sapiens
TFETPLVCHPHALLGRGAGRS

SEQ ID NO: 32607 - protein, 53 aa, Homo sapiens
ITICKTNGEDQDKDKLYHRKAIENAKMKHLNEGLITLNSAFVNLICRYVQTTS

SEQ ID NO: 32608 - protein, 32 aa, Homo sapiens
IECTLYNFSGIVIENKIFTIITGFFQVTSCRL

SEQ ID NO: 32609 - protein, 22 aa, Homo sapiens
RRLAVSSLKPSNTVMFQPSPEP

SEQ ID NO: 32610 - protein, 55 aa, Homo sapiens
KLIKEIKNYIQGINLVQAKKLVESLPQEIKANVAKAEAEKIKAALEAVGGTVVLE

SEQ ID NO: 32611 - protein, 26 aa, Homo sapiens
RSLGVHFSKVRSLTLDSWEPELVKVT

SEQ ID NO: 32612 - protein, 60 aa, Homo sapiens
VWTEIAPIRPESSDSGLGEGDSKRRRVSPYPSSGDSSSPAGAPSPFDKEAEGQFYNYFPN

SEQ ID NO: 32613 - protein, 11 aa, Homo sapiens
KVLGKGSVFVL

SEQ ID NO: 32614 - protein, 6 aa, Homo sapiens
LSLLLI

SEQ ID NO: 32615 - protein, 6 aa, Homo sapiens
MKNIRL

SEQ ID NO: 32616 - protein, 168 aa, Homo sapiens
LQEHSPEPRRARAPPTRRAQAALYAPALRLRDHLDRFSILMTSCTSWLQAPQAPGLCRDEQSSRISVPQLSGAPILLPDLEGTKLSNFQESSPLPHKHERKDKRSTPEEEGRSAPEKIIQSLKLCPGGHRPASLSSGCPAGCRLSFNLPPSMLLSVQKCCMPSSLKTC

SEQ ID NO: 32617 - protein, 47 aa, Homo sapiens
KIMTEKELLAVACEQFLGKNVQDIKNVVLQTLEGHLRSILGEALFSL

SEQ ID NO: 32618 - protein, 62 aa, Homo sapiens
LGDAHIYLNHIEPLKIQLQREPRPFPKLRILRKVEKIDDFKAEDFQIEGYNPHPTIKMEMAV

SEQ ID NO: 32619 - protein, 15 aa, Homo sapiens
TAPACGLCLISPGCL

SEQ ID NO: 32620 - protein, 462 aa, Homo sapiens
IHDFECQCHNDERNYREIPAIKIKNITGRRDQGDGRNAGNKPVENQLELSFWLHLAELQGFQIERKIYECNQIEKSVTRGSSVSLLQTNLPCVNTSISNIYRNDFMHPSLLTQDQKAYIREKPYKCSDCGKAFNQRSNLTTHQRIHTGQKPHKCDICGKGFRRIANLASHHRIHTGEKPYRCNECGKTFNQTFNLTTHQRIHTGQKPYKCDRCGKGFRQIGNLASHHRIHTGEKPYRCNECGKTFNRMFHLTRHQRIHTGQKPYKCDICGKGFRQIANLASHHRIHTGEKPYKCSDCGKTFNYRSHLTRHQRIHTGQKPYKCDTCGKDFSQNSYLENHQRIHTREKSYRCNECGKTFNKMTNLTTHQRIHTGQKTYKCDICGKGFRQIGNLASHHRIHTGEKPYRCNECGKTFNRMFHLTRHQRIHTGQKPYKCDICGKSFSQNSYLENHQRIHTGEKTYKL

SEQ ID NO: 32621 - protein, 422 aa, Homo sapiens
VENDLLDYDEEEEPQAPQESTPAPPKKDIKGSYVSIHSSGFRDFLLKPELLRAIVDCGFEHPSEVQHECIPQAILGMDVLCQAKSGMGKTAVFVLATLQQIEPVNGQVTVLVMCHTRELAFQISKEYERFSKYMPSVKVSVFFGGLSIKKDEEVLKKNCPHVVVGTPGRILALVRNRSFSLKNVKHFVLDECDKMLEQLDMRRDVQEIFRLTPHEKQCMMFSATLSKDIRPVCRKFMQDPMEVFVDDETKLTLHGLQQYYVKLKDSEKNRKLFDLLDVLEFNQVIIFVKSVQRCMALAQLLVEQNFPAIAIHRGMAQEERLSRYQQFKDFQRRILVATNLFGRGMDIERVNIVFNYDMPEDSDTYLHRVARAGRFGTKGLAITFVSDENDAKILNDVQDRFEVNVAELPEEIDISTYIEQSR

SEQ ID NO: 32622 - protein, 12 aa, Homo sapiens
KFKNSLVVSFLR

SEQ ID NO: 32623 - protein, 689 aa, Homo sapiens
RTLYRDVMLENYRNLVSLDISSKCMMKTFFSTGQGNTEAFHTGTLQRQASHHIGDFCFQKIEKDIHGFQFQWKEDETNDHAAPMTEIKELTGSTGQHDQRHAGNKHIKDQLGLSFHSHLPELHIFQPEGKIGNQVEKSINNASSVSTSQRICCRPKTHISNKYGNNSLHSSLLTQKRNVHMREKSFQCIESGKSFNCSSLLKKHQITHLEEKQCKCDVYGKVFNQKRYLACHRRSHIDEKPYKCNECGKIFGHNTSLFLHKALHTADKPYECEECDKVFSRKSHLETHKIIYTGGKPYKCKVCDKAFTCNSYLAKHTIIHTGEKPYKCNECGKVFNRLSTLARHRRLHTGEKPYECEECEKVFSRKSHLERHKRIHTGEKPYKCKVCDKAFAYNSYLAKHSIIHTGEKPYKCNECGKVFNQQSTLARHHRLHTAEKPYKCEECDKVFRCKSHLERHRRIHTGEKPYKCKVCDKAFRSDSCLTEHQRVHTGEKPYMCNECGKVFSTKANLACHHKLHTAEKPYKCEECEKVFSRKSHMERHRRIHTGEKPYKCKVCDKAFRRDSHLAQHQRVHTGEKPYKCNECGKTFRQTSSLIIHRRLHTGEKPYKCNECGKTFSQMSSLVYHHRLHSGEKPYKCNECGKVFNQQAHLAQHQRVHTGEKPYKCNECGKTFSQMSNLVYHHRLHSGEKP

SEQ ID NO: 32624 - protein, 415 aa, Homo sapiens
LDVPACQIAIRPEGKNNRLFVFSISMASVAHWSLDVAADSQEELQDWVKKIREVAQTADARLTEGKIMERRKKIALELSELVVYCRPVPFDEEKIGTERACYRDMSSFPETKAEKYVNKAKGKKFLQYNRLQLSRIYPKGQRLDSSNYDPLPMWICGSQLVALNFQTPDKPMQMNQALFMTGRHCGYVLQPSTMRDEAFDPFDKSSLRGLEPCAISIEVLGARHLPKNGRGIVCPFVEIEVAGAEYDSTKQKTEFVVDNGLNPVWPAKPFHFQISNPEFAFLRFVVYEEDMFSDQNFLAQATFPVKGLKTGYRAVPLKNNYSEDLELASLLIKIDIFPAKENGDLSPFSGTSLRERGSDASGQLFHGRAREGSFESRYQQPFEDFRISQEHLADHFDSRERRAPRRTRVNGDNRL

SEQ ID NO: 32625 - protein, 18 aa, Homo sapiens
VAPDAKSEFFQQGAFMGY

SEQ ID NO: 32626 - protein, 66 aa, Homo sapiens
VLDKQIMVLGGLCYNGHYSDSILTFDPDENKWKEDEYPRMPCKLDGLQVCNLHFPDYVLDEVRRCN

SEQ ID NO: 32627 - protein, 326 aa, Homo sapiens
MVEKLGFRLTTSAKDGNWGFSLEAGLDHSKHPESKETQQSSSENSYFCSTKFSYIPLASCHFPIDQLQLSKPAVQELKCIEELLSQTTNPDRFSLLRHRIINFFHRFGSHVNQGPLHLGGIYWWKAISEGYCTEQLAEVRQQSAEALDIFIRDSYSGFGVKVAAGVNVSDSHSKTATQTKTSQNLQTKVQLSVAQTGGPPEADGLVQWKAGLIASNQTWCVIDRGLQLVPVWDIILSSHRSNFKDPLQVANFLKDSYTALTSITAQIQNGEELLSAGKEARVFLEDVKSWEVSDPEEQLKKLINFMKMLSQKLKSYDTWINICLTD

SEQ ID NO: 32628 - protein, 19 aa, Homo sapiens
MEGAAKARFWASLQSSSAP

SEQ ID NO: 32629 - protein, 264 aa, Homo sapiens
MLTQLPILYWDTRFFFFFLRRSLALSPGWSAVARSQLTATSASRVQVILLPQPPEHVELQAEGDVAALNRRIQLVEEELDRAQERLATALQKLEEAEKAADESERGMKVIENRAMKDEEKMEIQEMQLKEAKHIAEEADRKYEEVARKLVILEGELERAEERAEVSELKCGDLEEELKNVTNNLKSLEAASEKYSEKEDKYEEEIKLLSDKLKEAETRAEFAERTVAKLEKTIDDLEEKLAQAKEENVGLHQTLDQTLNELNCI

SEQ ID NO: 32630 - protein, 149 aa, Homo sapiens
MMANNPEDWLSLLLKLEKNSVPLSDALLNKLIGRYSQAIEALPPDKYGQNESFARIQVRFAELKAIQEPDDARDYFQMARANCKKFAFVHISFAQFELSQGNVKKSKQLLQKAVERGAVPLEMLEIALRNLNLQKKQLLSEEEKKNLSE

SEQ ID NO: 32631 - protein, 179 aa, Homo sapiens
RSEKREKKPAPSLRGNRSSNCFSEKSSKGGSEGKKQKRGRHASACRGERSRDRRSRGGSATKETVTGSGAAKEEAVLPGSAPGHSWLAAALSAAKGHRPGTARGGKVAPGAEAAERSPRRRPDWLPRNCGDSPYSELGLRFPGLSPSPEAPTKPGKEGKDSGGSSSMSAYSRKPERARS

SEQ ID NO: 32632 - protein, 33 aa, Homo sapiens
IHRLLKQERKRDLPCSVTPLEKKKKSRSILLSP

SEQ ID NO: 32633 - protein, 40 aa, Homo sapiens
MFCTRHEGTDSTVFLPHSHNISEWISRHIPFGFLHLCSYE

SEQ ID NO: 32634 - protein, 52 aa, Homo sapiens
LPRSPRGPGIRRTGWHCLKRRLLGDCAARIGGSPNILRSEDPAQVRCHRTCS

SEQ ID NO: 32635 - protein, 39 aa, Homo sapiens
LPHPSQGGACVGRTLNPAARPLDGRRRDGWPPCTAPAVS

SEQ ID NO: 32636 - protein, 73 aa, Homo sapiens
IIARRASIRRVSITRSNRSGNTIKKEKKGISGFPGRGGASLLGSCSSRRFLNTAFYALYNLASHTFTLTLYDF

SEQ ID NO: 32637 - protein, 18 aa, Homo sapiens
LHPAIPLQTAPTGVMPSV

SEQ ID NO: 32638 - protein, 124 aa, Homo sapiens [sequence omitted]

SEQ ID NO: 32639 - protein, 287 aa, Homo sapiens
IPRSRLVKYPLLLKEILKHTPKEHPDVQLLEDAILIIQGVLSDINLKKGESECQYYIDKLEYLDEKQRDPRIEASKVLLCHGELRSKSGHKLYIFLFQDILVLTRPVTRNERHSYQVYRQPIPVQELVLEDLQDGDVRMGGSFRGAFSNSEKAKNIFRIRFHDPSPAQSHTLQANDVFHKQQWFNCIRAAIAPFQSAGSPPELQGLPELHEECEGNHPSARKLTAQRRASTVSSVTQVEVDENAYRCGSGMQMAEDSKSLKTHQTQPGIRRARDKALSGGKRKETLV

SEQ ID NO: 32640 - protein, 841 aa, Homo sapiens
VAAFLLDHGASLSITTKKGFTPLHVAAKYGKLEVANLLLQKSASPDAAGKSGLTPLHVAAHYDNQKVALLLLDQGASPHAAAKNGYTPLHIAAKKNQMDIATTLLEYGADANAVTRQGIASVHLAAQEGHVDMVSLLLGRNANVNLSNKSGLTPLHLAAQEDRVNVAEVLVNQGAHVDAQTKMGYTPLHVGCHYGNIKIVNFLLQHSAKVNAKTKNGYTPLHQAAQQGHTHIINVLLQNNASPNELTVNGNTALGIARRLGYISVVDTLKIVTEETMTTTTVTEKHKMNVPETMNEVLDMSDDEGEDAMTGDTDKYLGPQDLKELGDDSLPAEGYMGFSLGARSASPKISSDRSYTLNRSSYARDSMMIEELLVPSKEQHLTFTREFDSDSLRHYSWAADTLDNVNLVSSPIHSGYSSPLPQYDSRFLVSFMVDARGGSMRGSRHHGMRIIIPPRKCTAPTRITCRLVKRHKLANPPPMVEGEGLASRLVEMGPAGAQFLGPVIVEIPHFGSMRGKERELIVLRSENGETWKEHQFDSKNEDLTELLNGMDEELDSPEELGKKRICRIITKDFPQYFAVVSRIKQESNQIGPEGGILSSTTVPLVQASFPEGALTKRIRVGLQAQPVPDEIVKKILGNKATFSPIVTVEPRRRKFHKPITMTIPVPPPSGEGVSNGYKGDTTPNLRLLCSITGGTSPAQWEDITGTTPLTFIKDCVSFTTNVSARFWLADCHQVLETVGLATQLYRELICVPYMAKFVVFAKMNDPVESSLRCFCMTDDKVDKTLEQQENFEEVARSKDIEVPCSQKQVHFITYSRYEVLFCGLNSTHYKIPSALLILLLL

SEQ ID NO: 32641 - protein, 69 aa, Homo sapiens
RHPVCPARPMLAPVVWGPCVPEEQPWHLSGAGRGPWRPTVDGDHWQGPAPSIPSARDVCVASGPRVRGR

SEQ ID NO: 32642 - protein, 8 aa, Homo sapiens
LVSQCRTR

SEQ ID NO: 32643 - protein, 31 aa, Homo sapiens
RQLQQLEKELETFPPPEDLHDKFVTKMSISF

SEQ ID NO: 32644 - protein, 64 aa, Homo sapiens
LRQEEPQSLQAAVRTDGFDEFKVRLQDLSSCITQGKDAAVSKKASPEAASTPRDPIDVDLVRWV

SEQ ID NO: 32645 - protein, 40 aa, Homo sapiens
VRRLPCMHLFHQVCVDQWLITNKKCPICRVDIEAQLPSES

SEQ ID NO: 32646 - protein, 8 aa, Homo sapiens
KSNFCILL

SEQ ID NO: 32647 - protein, 18 aa, Homo sapiens
IELSHSSLNNVSLFTLVF

SEQ ID NO: 32648 - protein, 522 aa, Homo sapiens
LACRTPSPARPALRAPASATSGSRKRARPPAAPGRDQARPPARRRLRLSVDEVSSPSTPEAPDIPACPSPGQKIKKSTPAAGQPPHLTSAQDQDTISELASCLQRARELGARVRALKASAQDAGESCTPEAEGRPEEPCGEKAPAYQRFHALAQPGLPGLVLPYKYQVLAEMFRSMDTIVGMLHNRSETPTFAKVQRGVQDMMRRRFEECNVGQIKTVYPASYRFRQERSVPTFKDGTRRSDYQLTIEPLLEQEADGAAPQLTASRLLQRRQIFSQKLVEHVKEHHKAFLASLSPAMVVPEDQLTRWHPRFNVDEVPDIEPAALPQPPATEKLTTAQEVLARARNLISPRMEKALSQLALRSAAPSSPGSPRPALPATPPATPPAASPSALKGVSQDLLERIRAKEAQKQLAQMTRCPEQEQRLQRLERLPELARVLRSVFVSERKPALSMEVACARMVGSCCTIMSPGEMEKHLLLLSELLPDWLSLHRIRTDTYVKLDKAADLAHITARLAHQTRAEEGL

SEQ ID NO: 32649 - protein, 85 aa, Homo sapiens
LKQKRRTLKNRGYAQSCRFKRVQQRHVLESEKNQLLQQVDHLKQEISRLVRERDAYKEKYEKLVSSGFRENGSSSDNPSSPEFFM

SEQ ID NO: 32650 - protein, 37 aa, Homo sapiens
MGKSLVSTCHHGCGFFGVSVSELLDYYGLCFLLIKTF

SEQ ID NO: 32651 - protein, 44 aa, Homo sapiens
RASALSPWPGVWEEGFISMLESRVNGQGKLWGLLPAGPSLQPSP

SEQ ID NO: 32652 - protein, 108 aa, Homo sapiens
LALLTLEPTFRHLLRIMQVSTAALAVLLCTMALCNQFSASLAADTPTACCFSYTSRQIPQNFIADYFETSSQCSKPGVIFLTKRSRQVCADPSEEWVQKYVSDLELSA

SEQ ID NO: 32653 - protein, 61 aa, Homo sapiens
KNPEFRVQFQDMCATIGVDPLASGKGFWSEMLGVGDFYYELGVQIIEVCLALKHRNGGEGG

SEQ ID NO: 32654 - protein, 33 aa, Homo sapiens
TRGGAGTAAAAAAAGGTLIPVLRTPRASPWLTS

SEQ ID NO: 32655 - protein, 36 aa, Homo sapiens
TWNLLCRQRLQSRCPGCFLETPRTCPTWTPSTCSWR

SEQ ID NO: 32656 - protein, 240 aa, Homo sapiens
LVLALLFPSMASMAAIGSCSKEYRVLLGQLQKQTDLMQDTSRLLDPYIRIQGLDVPKLREHCRERPGAFPSEETLRGLGRRGFLQTLNATLGCVLHRLADLEQRLPKAQDLERSGLNIEDLEKLQMARPNILGLRNNIYCMAQLLDNSDTAEPTKAGRGASQPPTPTPASDAFQRKLEGCRFLHGYHRFMHSVGRVFSKWGESPNRSRRHSPHQALRKGVRRTRPSRKGKRLMTRGQLPR

SEQ ID NO: 32657 - protein, 341 aa, Homo sapiens
KTSCADMQKMLFEERNHFAEIETELQAELVRMEQQHQEKVLYLLSQLQQSQMAEKQLEESVSEKEQQLLSTLKCQDEELEKMREVCEQNQQLLRENEIIKQKLTLLQVASRQKHLPKDTLLSPDSSFEYVPPKPKPSRVKEKFLEQSMDIEDLKYCSEHSVNEHEDGDGDDDEGDDEEWKPTKLVKVSRKNIQGCSCKGWCGNKQCGCRKQKSDCGVDCCCDPTKCRNRQQGKDSLGTVERTQDSEGSFKLEDPTEVTPGLSFFNPVCATPNSKILKEMCDVEQVLSKKTPPAPSPFDLPELKHVATEYQENKAPGKKKKRALASNTSFFSGCSPIEEEAH

SEQ ID NO: 32658 - protein, 18 aa, Homo sapiens
RPLPSRALVFLFLFFFFF

SEQ ID NO: 32659 - protein, 59 aa, Homo sapiens
KKDAASGEHPGSKTGPGLSTVGSVTRLGKAGAPAVGLLLANERSPRRRRGANDPTQDGE

SEQ ID NO: 32660 - protein, 117 aa, Homo sapiens
MGDVKESKMQITPETPGRIPVLNPFESPSDYSNLHEQTLASPSVFKSTKLPTPGKFRWSIDQLAVINPVEIDPEDIHRQALYLSHSRFSLKMSSYPLLGLIMKGNSFHNVIPVNALT

SEQ ID NO: 32661 - protein, 273 aa, Homo sapiens
MLLFLCRDVAIDVVPPNVRDLLDILRERGKLSVGDLAELLYRVRRFDLLKRILKMDRKAVETHLLRNPHLVSDYRVLMAEIGEDLDKSDVSSLIFLMKDYMGRGKISKEKSFLDLVVELEKLNLVAPDQLDLLEKCLKNIHRIDLKTKIQKYKQSVQGAGTSYRNVLQAAIQKSLKDPSNNFRLHNGRSKEQRLKEQLGAQQEPVKKSIQESEAFLPQSIPEERYKMKSKPLGICLIIDCIGNETGWSAMAQSQLTAISTSQVQAILLPQPPE

SEQ ID NO: 32662 - protein, 127 aa, Homo sapiens
MKGFIMINPLEYKYKNGASPVLEVQLTKDLICFFDSSVELRNSMESQQRIRMMKELDVCSPEFSFLRAESEVKKQKGRMLGDVLMDQNVLPGVGNIIKNEALFDSGLHPAVKIQCSRVKKILLSLAT

SEQ ID NO: 32663 - protein, 99 aa, Homo sapiens
MAASQAVEEMRSRVVLGEFGVRNVHTTDFPGNYSGYDDAWDQDRFEKNFRVDVVHMDENSLEFDMVGIDAAIANAFRRILLAEVLAGMVTRLELLWELH

SEQ ID NO: 32664 - protein, 150 aa, Homo sapiens
MTLRTKQLHLVHWNTKYGDFGKAVQQPDGLAVLGIFLKVGSAKPGLQKVVDVLDSIKTKGKSADFTNFDPRGLLPESLDYWTYPGSLTTPPLLECVTWIVLKEPISVSSEQVLKFRKLNFNGEGEPEELMVDNWRPAQPLKNRQIKASFK

SEQ ID NO: 32665 - protein, 18 aa, Homo sapiens
VSHTTRNPRPGEENGKGR

SEQ ID NO: 32666 - protein, 7 aa, Homo sapiens
ILSEMDT

SEQ ID NO: 32667 - protein, 86 aa, Homo sapiens
MTPLRGVKATQASKSTQLKTNRGQRKVTVSARTNRRCQTAEADSESDHEVPEPESEMKMRLPRRAKTAALEKSKLNLAQFLNEDLS

SEQ ID NO: 32668 - protein, 33 aa, Homo sapiens
LVAILWKLGFFKRKYEKMTKNPDEIDETTELSS

SEQ ID NO: 32669 - protein, 43 aa, Homo sapiens
KADRLGKSIDWGILAVFTCAESCSLGTGYTEEFVWKQDVTDTP

SEQ ID NO: 32670 - protein, 6 aa, Homo sapiens
RMAPRV

SEQ ID NO: 32671 - protein, 31 aa, Homo sapiens
LSLTSLGRLLYSKGMKETTSMSLIKGKWMCT

SEQ ID NO: 32672 - protein, 29 aa, Homo sapiens
RSPETGSAGRWWSPREGTGRMADADRNQR

SEQ ID NO: 32673 - protein, 26 aa, Homo sapiens
LEKRSCHHGCTFTEDQHWECGEDDAV

SEQ ID NO: 32674 - protein, 151 aa, Homo sapiens
LTKLNCFLEQDLKLDIPTGTTPQRKSYLYPSTLVRTEPREHLLDQLKRKQPELLMMLNCSENNKEETIPDVDVEEAVLGQYTEEPLSQEPSVDAGVDCSSIGGVPFFQHKKSHGKDKENRGINTLERSKVEETTEHLVTKSRLPLRAQINL

SEQ ID NO: 32675 - protein, 10 aa, Homo sapiens
TGKMATAPRR

SEQ ID NO: 32676 - protein, 31 aa, Homo sapiens
VAIAERQEGRGGPGRRPGGGAPLGPARTGFI

SEQ ID NO: 32677 - protein, 33 aa, Homo sapiens
LGRRMESEMLKVYVSFAPSASEPLPLGSTEHRD

SEQ ID NO: 32678 - protein, 9 aa, Homo sapiens
KNCNHYSKL

SEQ ID NO: 32679 - protein, 612 aa, Homo sapiens
LLGASAMRRSEVLAEESIVCLQKALNHLREIWELIGIPEDQRLQRTEVVKKHIKELLDMMIAEEESLKERLIKSISVCQKELNTLCSELHVEPFQEEGETTILQLEKDLRTQVELMRKQKKERKQELKLLQEQDQELCEILCMPHYDIDSASVPSLEELNQFRQHVTTLRETKASRREEFVSIKRQIILCMEALDHTPDTSFERDVVCEDEDAFCLSLENIATLQKLLRQLEMQKSQNEAVCEGLRTQIRELWDRLQIPEEEREAVATIMSGSKAKVRKALQLEVDRLEELKMQNMKKVIEAIRVELVQYWDQCFYSQEQRQAFAPFCAEDYTESLLQLHDAEIVRLKNYYEVHKELFEGVQKWEETWRLFLEFERKASDPNRFTNRGGNLLKEEKQRAKLQKMLPKLEEELKARIELWEQEHSKAFMVNGQKFMEYVAEQWEMHRLEKERAKQERQLKNKKQTETEMLYGSAPRTPSKRRGLAPNTPGKARKLNTTTMSNATANSSIRPIFGGTVYHSPVSRLPPSGSKPVAASTCSGKKTPRTGRHGANKENLELNGSILSGGYPGSAPLQRNFSINSVASTYSEFARELSKASKSDATSGILNSTNIQS

SEQ ID NO: 32680 - protein, 11 aa, Homo sapiens
RMATYPQRAGS

SEQ ID NO: 32681 - protein, 14 aa, Homo sapiens
KVLADSERYTWIVL

SEQ ID NO: 32682 - protein, 11 aa, Homo sapiens
MQDSGWRCQSP

SEQ ID NO: 32683 - protein, 47 aa, Homo sapiens
KLKVMWPPSTDASSSLRRSWTGLRNDWPRPCRSWRRQKKLQMRVREE

SEQ ID NO: 32684 - protein, 50 aa, Homo sapiens
TSVFGEKLREQVEERLSFYETGEIPRKNLDVMKEAMVQVSWALLGVEWHS

SEQ ID NO: 32685 - protein, 33 aa, Homo sapiens
RQRARLQGSATAAEAQVGHQTARAAPGPAQQQG

SEQ ID NO: 32686 - protein, 7 aa, Homo sapiens
TAAAVAA

SEQ ID NO: 32687 - protein, 75 aa, Homo sapiens
LRGSECTVVLPPEAVLVPSDNFTITFHHCMSGREQVSLVDPEYLPRRHEQHQFWPLHPDLEHQSCLGANDHTSQL

SEQ ID NO: 32688 - protein, 23 aa, Homo sapiens
ILDFRNAKNGFERAKTWKSKIGN

SEQ ID NO: 32689 - protein, 109 aa, Homo sapiens
MQITPETPGRIPVLNPFESPSDYSNLHEQTLASPSVFKSTKLPTPGKFRWSIDQLAVINPVEIDPEDIHRQALYLSHSRFSLKMSSYPLLGLIMKGNSFHNVIPVNALT

SEQ ID NO: 32690 - protein, 83 aa, Homo sapiens [sequence omitted]

SEQ ID NO: 32691 - protein, 86 aa, Homo sapiens
MEAALKRPVPGFGVGRSTFVPGLRSEGGRGASQQLRPGKVCPGWCRTAHVSGRPTRAEQTERTRPSRGPFLAWHTRSGADLCFHVM

SEQ ID NO: 32692 - protein, 61 aa, Homo sapiens
TCLATSSGGPRPPSSSLPSFLLPCPISAAPRSLRRAPWLLGRAVVGWPRPTPYGGGSSPPF

SEQ ID NO: 32693 - protein, 1410 aa, Homo sapiens
VSENAKDLIRRLICSREHRLGQNGIEDFKKHPFFSGIDWDNIRNCEAPYIPEVSSPTDTSNFDVDDDCLKNSETMPPPTHTAFSGHHLPFVGFTYTSSCVLSDRSCLRVTAGPTSLDLDVNVQRTLDNNLATEAYERRIKRLEQEKLELSRKLQESTQTVQALQYSTVDGPLTASKDLEIKNLKEEIEKLRKQVTESSHLEQQLEEANAVRQELDDAFRQIKAYEKQIKTLQQEREDLNKELVQASERLKNQSKELKDAHCQRKLAMQEFMEINERLTELHTQKQKLARHVRDKEEEVDLVMQKVESLRQELRRTERAKKELEVHTEALAAEASKDRKLREQSEHYSKQLENELEGLKQKQISYSPGVCSIEHQQEITKLKTDLEKKSIFYEEELSKREGIHANEIKNLKKELHDSEGQQLALNKEIMILKDKLEKTRRESQSEREEFESEFKQQYEREKVLLTEENKKLTSELDKLTTLYENLSIHNQQLEEEVKDLADKKESVAHWEAQITEIIQWVSDEKDARGYLQALASKMTEELEALRNSSLGTRATDMPWKMRRFAKLDMSARLELQSALDAEIRAKQAIQEELNKVKASNIITECKLKDSEKKNLELLSEIEQLIKDTEELRSEKGIEHQDSQHSFLAFLNTPTDALDQFETVDSTPLSVHTPTLRKKGCPGSTGFPPKRKTHQFFVKSFTTPTKCHQCTSLMVGLIRQGCSCEVCGFSCHITCVNKAPTTCPVPPEQTKGPLGIDPQKGIGTAYEGHVRIPKPAGVKKGWQRALAIVCDFKLFLYDIAEGKASQPSVVISQVIDMRDEEFSVSSVLASDVIHASRKDIPCIFRVTASQLSASNNKCSILMLADTENEKNKWVGVLSELHKILKKNKFRDRSVYVPKEAYDSTLPLIKTTQAAAIIDHERIALGNEEGLFVVHVTKDEIIRVGDNKKIHQIELIPNDQLVAVISGRNRHVRLFPMSALDGRETDFYKLSETKGCQTVTSGKVRHGALTCLCVAMKRQVLCYELFQSKTRHRKFKEIQVPYNVQWMAIFSEQLCVGFQSGFLRYPLNGEGNPYSMLHSNDHTLSFIAHQPMDAICAVEISSKEYLLCFNSIGIYTDCQGRRSRQQELMWPANPSSCCYNAPYLSVYSENAVDIFDVNSMEWIQTLPLKKVRPLNNEGSLNLLGLETIRLIYFKNKMAEGDELVVPETSDNSRKQMVRNINNKRRYSFRVPEEERMQQRREMLRDPEMRNKLISNPTNFNHIAHMGPGDGIQILKDLPMNPRPQESRTVFSGSVSIPSITKSRPEPGRSMSASSGLSARSSAQNGSALKREFSGGSYSAKRQPMPSPSEGSLSSGGMDQGSDAPARDFDGEDSDSPRHSTASNSSNLSSPPSPASPRKTKSLSLESTDRGSWDP

SEQ ID NO: 32694 - protein, 20 aa, Homo sapiens
IIASHLFIFLGIFIALNKKY

SEQ ID NO: 32695 - protein, 56 aa, Homo sapiens
RLGVSASERSLGELYFLPRFYGHPCPFEGRRLGPETGLLFPRLDQSRTWLVKAHRT

SEQ ID NO: 32696 - protein, 34 aa, Homo sapiens
LDLKTACTQPFPRVALHSQAQCRIQACMCGGWRS

SEQ ID NO: 32697 - protein, 53 aa, Homo sapiens
KRGTSCCSSFGKCYFCSFGVPSHQPEHCSSCSFESPDSNRLHVCSGQQRCWVS

SEQ ID NO: 32698 - protein, 48 aa, Homo sapiens
THLLCMTNMFCTRHEGTDSTVFLPHSHNISEWISRHIPFGFLHLCSYE

SEQ ID NO: 32699 - protein, 49 aa, Homo sapiens
MKYLEKRIMFVNIIFMSCRNELLKWKLKRKKFMKIPKKLMRRAIYYQMK

SEQ ID NO: 32700 - protein, 30 aa, Homo sapiens
IPVVVVDAENTEFIKELCNCWTREPLCYRN

SEQ ID NO: 32701 - protein, 120 aa, Homo sapiens
MERPLLNQEHLEELGRWGSAPRTHQWRTWLQCSRARAYALLLQHLPVLVWLPRYPVRDWLLGDLLSGLSVAIMQLPQGLAYALLAGLPPVFGLYSSFYPVFIYFLFGTSRHISVGKWRQA

SEQ ID NO: 32702 - protein, 27 aa, Homo sapiens
VETAATARKSSPPASSPQPEAPTSSWR

SEQ ID NO: 32703 - protein, 19 aa, Homo sapiens
MNSPGGIMCHHFILGHPKG

SEQ ID NO: 32704 - protein, 17 aa, Homo sapiens
MPENPECAPDMTRSRRR

SEQ ID NO: 32705 - protein, 7 aa, Homo sapiens
KTELKSA

SEQ ID NO: 32706 - protein, 75 aa, Homo sapiens
RHSHTGVKSTPGQSAAILMKLRSSHNASKTLNANNMETLIECQSEGDIKEHPLLASCESEDSICQLIGHSHYSMP

SEQ ID NO: 32707 - protein, 19 aa, Homo sapiens
KEILQESKKTQNCKAQESS

SEQ ID NO: 32708 - protein, 7 aa, Homo sapiens
MYLIIGF

SEQ ID NO: 32709 - protein, 80 aa, Homo sapiens
LNYDVAAKKRKKDMLNSKTKTQYFHQEKWIYVHKGSTKERHGYCTLGEAFNRLDFSTAILDSRRFNYVVRALPLASEGNR

SEQ ID NO: 32710 - protein, 19 aa, Homo sapiens
LIHSEIYKGCYPAGFLLFS

SEQ ID NO: 32711 - protein, 45 aa, Homo sapiens
RRRASKILGSRTWPEPLDRAGPSPETWRVATTQVWMVLLNMMISN

SEQ ID NO: 32712 - protein, 38 aa, Homo sapiens
LGSRTWPEPLDRAGPSPETWRVATTQVWMVLLNMMISN

SEQ ID NO: 32713 - protein, 19 aa, Homo sapiens
TSGGSTSGLAGRIVPVEEL

SEQ ID NO: 32714 - protein, 8 aa, Homo sapiens
VGSSAQAG

SEQ ID NO: 32715 - protein, 12 aa, Homo sapiens
IIPRLKLSKYNE

SEQ ID NO: 32716 - protein, 97 aa, Homo sapiens
RRWVQKPPLNIQRPLVDSAGPRPKARHQAETSQRLVGISQPRNPLEELRPSPRGQNVGPGPPAQTVLVPAPGKLFALRRSPFPPAKCHLARCHGLYL

SEQ ID NO: 32717 - protein, 12 aa, Homo sapiens
MISCQKRSLQKC

SEQ ID NO: 32718 - protein, 38 aa, Homo sapiens
ISGPIRIPRKSNGIRGFLLTWRRDGNTSTSVQQTTSSL

SEQ ID NO: 32719 - protein, 15 aa, Homo sapiens
IMTLMIFNRIKIEFF

SEQ ID NO: 32720 - protein, 1094 aa, Homo sapiens
LLGSRVRALVASVAPRAGCGRKPRRSVAQRKGLQQDEDLSQECRMAAVKKEGGALSEAMSLEGDEWELSKENVQPLRQGRIMSTLQGALAQESACNNTLQQQKRAFEYEIRFYTGNDPLDVWDRYISWTEQNYPQGGKESNMSTLLERAVEALQGEKRYYSDPRFLNLWLKLGRLCNEPLDMYSYLHNQGIGVSLAQFYISWAEEYEARENFRKADAIFQEGIQQKAEPLERLQSQHRQFQARVSRQTLLALEKEEEEEVFESSVPQRSTLAELKSKGKKTARAPIIRVGGALKAPSQNRGLQNPFPQQMQNNSRITVFDENADEASTAELSKPTVQPWIAPPMPRAKENELQAGPWNTGRSLEHRPRGNTASLIAVPAVLPSFTPYVEETARQPVMTPCKIEPSINHILSTRKPGKEEGDPLQRVQSHQQASEEKKEKMMYCKEKIYAGVGEFSFEEIRAEVFRKKLKEQREAELLTSAEKRAEMQKQIEEMEKKLKEIQTTQQERTGDQQEETMPTKETTKLQIASESQKIPGMTLSSSVCQVNCCARETSLAENIWQEQPHSKGPSVPFSIFDEFLLSEKKNKSPPADPPRVLAQRRPLAVLKTSESITSNEDVSPDVCDEFTGIEPLSEDAIITGFRNVTICPNPEDTCDFARAARFVSTPFHEIMSLKDLPSDPERLLPEEDLDVKTSEDQQTACGTIYSQTLSIKKLSPIIEDSREATHSSGFSGSSASVASTSSIKCLQIPEKLELTNETSENPTQSPWCSQYRRQLLKSLPELSASAELCIEDRPMPKLEIEKEIELGNEDYCIKREYLICEDYKLFWVAPRNSAELTVIKVSSQPVPWDFYINLKLKERLNEDFDHFCSCYQYQDGCIVWHQYINCFTLQDLLQHSEYITHEITVLIIYNLLTIVEMLHKAEIVHGDLSPRCLILRNRIHDPYDCNKNNQALKIVDFSYSVDLRVQLDVFTLSGFRTVQILEGQKILANCSSPYQVDLFGIADLAHLLLFKEHLQVFWDGSFWKLSQNISELKDGELWNKFFVRILNANDEATVSVLGELAAEMNGVFDTTFQSHLNKALWKVGKLTSPGALLFQ

SEQ ID NO: 32721 - protein, 409 aa, Homo sapiens
LERHVVSFDSSRPTSGKMNCDVCGLSCISFNVLMVHKRSHTGERPFQCNQCGASFTQKGNLLRHIKLHTGEKPFKCHLCNYACQRRDALTGHLRTHSVEKPYKCEFCGRSYKQRSSLEEHKERCRTFLQSTDPGDTASAEARHIKAEMGSERALVLDRLASNVAKRKSSMPQKFIGEKRHCFDVNYNSSYMYEKESELIQTRMMDQAINNAISYLGAEALRPLVQTPPAPTSEMVPVISSMYPIALTRAEMSNGAPQELEKKSIHLPEKSVPSERGLSPNNSGHDSTDTDSNHEERQNHIYQQNHMVLSRARNGMPLLKEVPRSYELLKPPPICPRDSVKVINKEGEVMDVYRCDHCRVLFLDYVMFTIHMGCHGFRDPFECNMCGYRSHDRYEFSSHIARGEHRALLK

SEQ ID NO: 32722 - protein, 367 aa, Homo sapiens
LFAGGRESSSALDPSSPPPFSLRMAQKENSYPWPYGRQTAPSGLSTLPQRVLRKEPVTPSALVLMSRSNVQPTAAPGQKVMENSSGTPDILTRHFTIDDFEIGRPLGKGKFGNVYLAREKKSHFIVALKVLFKSQIEKEGVEHQLRREIEIQAHLHHPNILRLYNYFYDRRRIYLILEYAPRGELYKELQKSCTFDEQRTATIMEELADALMYCHGKKVIHRDIKPENLLLGLKGELKIADFGWSVHAPSLRRKTMCGTLDYLPPEMIEGRMHNEKVDLWCIGVLCYELLVGNPPFESASHNETYRRIVKVDLKFPASVPMGAQDLISKLLRHNPSERLPLAQVSAHPWVRANSRRVLPPSALQSVA

SEQ ID NO: 32723 - protein, 56 aa, Homo sapiens
RIFMSTIQPSLADQRLEFKLILDMSALVMTLMYSCMDLYAIFFHYPRSTLDTSCLN

SEQ ID NO: 32724 - protein, 19 aa, Homo sapiens
LWAGPSLRMQDSGWRCQSP

SEQ ID NO: 32725 - protein, 80 aa, Homo sapiens
VKLLDDGTFMIPGEKVAHTSLDALVTFHQQKPIEPRRELLTQPCRQKDPANVDYEDLFLYSNAVAEEAACPVSAPEEVCI

SEQ ID NO: 32726 - protein, 27 aa, Homo sapiens
VGSNMFPNHYREAAFGGGLLSPGPEAT

SEQ ID NO: 32727 - protein, 47 aa, Homo sapiens
RTSATRRRRSVRPTKRSRSSCRRTSRSTGPRTACCCWVLENLVKAPL

SEQ ID NO: 32728 - protein, 207 aa, Homo sapiens [sequence omitted]

SEQ ID NO: 32729 - protein, 972 aa, Homo sapiens
MEPSPRNQRKALNISEPFAVSVPLRVSAVISTNSTPCRTPPKELQSLSSLEEFSFHGSESGGWPEEEKPLGAETSAASVPKKAGLEDAKAVPEAPGTVECSKGLSQEPGAHLEEKKTPESSLSSQHLNELEKRPNPEKVVEEGREAGEMESSTLQESPRARAEAVLLHEMDEDDLANALIWPEIQQELKIIESEEELSSLPPPALKTSPIQPILESSLGPFIPSEPPGSLPCGSFPAPVSTPLEVWTRDPANQSTQGASTAASREKPEPEQGLHPDLASLAPLEIVPFEKASPQATVEVGGPGNLSPPLPPAPPPPTPLEESTPVLLSKGGPEREDSSRKLRTDLYIDQLKSQDSPEISSLCQGEEATPRHSDKQNSKNAASEGKGCGFPSPTREVEIVSQEEEDVTHSVQEPSDCDEDDTVTDIAQHGLEMVEPWEEPQWVTSPLHSPTLKDAHKAQVQGLQGHQLEKRLSHRPSLRQSHSLDSKPTVKSQWTLEVPSSSSCANLETERNSDPLQPQAPRREITGWDEKALRSFREFSGLKGAEAPPNQKGPSGVQPNPAETSPISLAEGKELGTHLGHSSPQIRQGGVPGPESSKESSPSVQDSTSPGEHPAKLQLKSTECGPPKGKNRPSSLNLDPAIPIADLFWFENVASFSSPGMQVSEPGDPKVTWMTSSYCKADPWRVYSQDPQDLDIVAHALTGRRNSAPVSVSAVRTSFMVKMCQARAVPVIPPKIQYTQIPQPLPSQSSGENGVQPLERSQEGPSSTSGTTQKPAKDDSPSSLESSKEEKPKQDPGAIKSSPVDATAPCMCEGPTLSPEPGSSNLLSTQDAVVQCRKRMSETEPSGDNLLSSKLERPSGGSKPFHRSRPGRPQSLILFSPPFPIMDHLPPSSTVTDSKVLLSPIRSPTQTVSPGLLCGELAENTWVTPEGVTLRNKMTIPKNGQRLETSTSCFYQPQRRSVILDGRSGRQIE

SEQ ID NO: 32730 - protein, 18 aa, Homo sapiens
LLDTTRNPRPGEENGKGR

SEQ ID NO: 32731 - protein, 28 aa, Homo sapiens
MASNIMIVTLPGASKLLGVGTKYLGSRI

SEQ ID NO: 32732 - protein, 36 aa, Homo sapiens
LCKLNLMTCSFLKTAVEEVLGVFIEPNGYHRTRRWL

SEQ ID NO: 32733 - protein, 94 aa, Homo sapiens
IAEDPPDAIAGLQAEWMQMSSLGTVDAPNFIVGNPWDDKLIFKLLSGLSKPVSSYPNTFEWQCKLPAIKPKTEFQLGKNYLDNITLNSCFSMRS

SEQ ID NO: 32734 - protein, 41 aa, Homo sapiens
LPIWFWNHREELGHSNTRCYHAGHPPLQTPVTAPRKNPKCL

SEQ ID NO: 32735 - protein, 32 aa, Homo sapiens
LGLQSPSSCIFPRACVSGCVCFLTKGISRSID

SEQ ID NO: 32736 - protein, 35 aa, Homo sapiens
VMCVLPLAECVESCSGVRYSVFDRGGLRGTRCSEL

SEQ ID NO: 32737 - protein, 74 aa, Homo sapiens
VMCVLPLAECVESCSGVRLHSEKLPLAARSAGPSLLVIIQSSQCPGGRRCPTPACIHPSRVPGVTGPRRQPWFC

SEQ ID NO: 32738 - protein, 45 aa, Homo sapiens
IFTCIKSKWKYVHIFSIWFPCICSSTVSINFTYYLTPLIWEMLDF

SEQ ID NO: 32739 - protein, 46 aa, Homo sapiens
ITCAWRGGDSSSHPLVSGHILSNSPVAAVMCSSMGTHLSPFKGTLL

SEQ ID NO: 32740 - protein, 64 aa, Homo sapiens
LVGTQSAQPSLRHCVSRAGPQTRPPLPHPSQGGACVGRTLNPAARPLDGRRRDGWPPCTAPAVS

SEQ ID NO: 32741 - protein, 417 aa, Homo sapiens
TWGAGCKEESSTLSVKMKCDFNCNHVHSGLKLVKPDDIGRLVSYTPAYLEGSCKDCIKDYERLSCIGSPIVSPRIVQLETESKRLHNKENQHVQQTLNSTNEIEALETSRLYEDSGYSSFSLQSGLSEHEEGSLLEENFGDSLQSCLLQIQSPDQYPNKNLLPVLHFEKVVCSTLKKNAKRNPKVDREMLKEIIARGNFRLQNIIGRKMGLECVDILSELFRRGLRHVLATILAQLSDMDLINVSKVSTTWKKILEDDKGAFQLYSKAIQRVTENNNKFSPHASTREYVMFRTPLASVQKSAAQTSLKKDAQTKLSNQGDQKGSTYSRHNEFSEVAKTLKKNESLKACIRCNSPAKYDCYLQRATCKREGCGFDYCTKCLCNYHTTKDCSDGKLLKASCKIGPLPGTKKSKKNLRRL

SEQ ID NO: 32742 - protein, 8 aa, Homo sapiens
LLLIMNVS

SEQ ID NO: 32743 - protein, 58 aa, Homo sapiens
LMKLRSSHNASKTLNANNMETLIECQSEGDIKEHPLLASCESEDSICQLIGHSHYSMP

SEQ ID NO: 32744 - protein, 21 aa, Homo sapiens
MMSLMKRDGTTFLRSMMGIFQ

SEQ ID NO: 32745 - protein, 607 aa, Homo sapiens
RNSIKKMAALTPRKRKQDSLKCDSLLHFTENLFPSPNKKHCFYQNSDKNEENLHCSQQEHFVLSALKTTEINRLPSANQGSPFKSALSTVSFYNQNKWYLNPLERKLIKESRSTCLKTNDEDKSFPIVTEKMQGKPVCSKKNNKKPQKSLTAKYQPKYRHIKPVSRNSRNSKQNRVIYKPIVEKENNCHSAENNSNAPRVLSQKIKPQVTLQGGAAFFVRKKSSLRKSSLENEPSLGRTQKSKSEVIEDSDVETVSEKKTFATRQVPKCLVLEEKLKIGLLSASSKNKEKLIKDSSDDRVSSKEHKVDKNEAFSSEDSLGENKTISPKSTVYPIFSASSVNSKRSLGEEQFSVGSVNFMKQTNIQKNTNTRDTSKKTKDQLIIDAGQKHFGATVCKSCGMIYTASNPEDEMQHVQHHHRFLEGIKYVGWKKERVVAEFWDGKIVLVLPHDPSFAIKKVEDVQELVDNELGFQQVVPKCPNKIKTFLFISDEKRVVGCLIAEPIKQAFRVLSEPIGPESPSSTECPRAWQCSDVPEPAVCGISRIWVFRLKRRKRIARRLVDTLRNCFMFGCFLSTDEIAFSDPTPDGKLFATKYCNTPNFLVYNFNS

SEQ ID NO: 32746 - protein, 37 aa, Homo sapiens
RSLARRIAESSPLFTTWSRFILPYPVFGFLSSPSSLC

SEQ ID NO: 32747 - protein, 17 aa, Homo sapiens
KPATRCEITRVIHRLKT

SEQ ID NO: 32748 - protein, 16 aa, Homo sapiens
LARRLHPTVFFSLFWS

SEQ ID NO: 32749 - protein, 33 aa, Homo sapiens
LHRPPGGHLESPAPRRPWPQVPTAGPRKEQGSG

SEQ ID NO: 32750 - protein, 35 aa, Homo sapiens
VSAAPAPPAADFGCDLTSGGSTSGLAGRIVPVEEL

SEQ ID NO: 32751 - protein, 93 aa, Homo sapiens
RSQHVVSQDLASLLTLMRKLKIPRPIQKSLKEKFQEILRYISRMSKKTVPQMTQKTVLLREQLMFIPQNMLDVMAEMQLIPFLGILKKFPALN

SEQ ID NO: 32752 - protein, 53 aa, Homo sapiens
RWRRAASWTSTWRLQDQITKEFTKETENPVGNTHLLLTWMEHTNFVLVTGCPP

SEQ ID NO: 32753 - protein, 58 aa, Homo sapiens
INGSFLNSNDLEIRGDAKENSCISISQTSVYSEYCSTEIRWICQKELTPVRNKVYPDS

SEQ ID NO: 32754 - protein, 26 aa, Homo sapiens
RVDIPTSRTVRILKTTQQKVKKWKIV

SEQ ID NO: 32755 - protein, 113 aa, Homo sapiens
RLTEAKGPTMGKESGWDSGRAAVAAVVGGVVAVGTVLVALSAMGFTSVGIAASSIAAKMMSTAAIANGGGVAAGSLVAILQSVGAAGLSVTSKVIGGFAGTALGAWLGSPPSS

SEQ ID NO: 32756 - protein, 80 aa, Homo sapiens
LQWAAAGDSCLASWAPCGCSARATERSSPRRQRHRGASARLVVTWMIVPVMLKPLIDLITTGFSQDYKNFLKVTTLGITR

SEQ ID NO: 32757 - protein, 24 aa, Homo sapiens
VETAFGKRKEMNFTDLTFLHLPFF

SEQ ID NO: 32758 - protein, 38 aa, Homo sapiens
LPGSPSTPRPPPGAPRAPRATTCTVPMITQYHLWRKLL

SEQ ID NO: 32759 - protein, 49 aa, Homo sapiens
LILPEDGATGGCGIRAPCPALCLPAQAGHSAGRPPSAAHRGQPCGQEPL

SEQ ID NO: 32760 - protein, 14 aa, Homo sapiens
LWNLGGSPGSAPSH

SEQ ID NO: 32761 - protein, 25 aa, Homo sapiens
KSAAALPGRNLPSTGKGGQQMCRAW

SEQ ID NO: 32762 - protein, 84 aa, Homo sapiens
KMLKSFWQKVCGMRTSALLQGITETIFYGAFSKSKPGTIGIFSPKGETLDRTALMIITAGLLACPSHPMHPFCQIIRMREWKTS

SEQ ID NO: 32763 - protein, 28 aa, Homo sapiens
RELSPCLTRTQPFLLSRRRSCLTLPCGL

SEQ ID NO: 32764 - protein, 38 aa, Homo sapiens
TVRGWGSLLRFCIPTRSYSNGTQRCKSANTNRIFKENT

SEQ ID NO: 32765 - protein, 448 aa, Homo sapiens
KSPVGSSVPECPWRCLVPAQRLCIRSWAPRRPVGYCLLLITARGIMDRSKENCISGPVKATAPVGGPKRVLVTQQFPCQNPLPVNSGQAQRVLCPSNSSQRIPLQAQKLVSSHKPVQNQKQKQLQATSVPHPVSRPLNNTQKSKQPLPSAPENNPEEELASKQKNEESKKRQWALEDFEIGRPLGKGKFGNVYLAREKQSKFILALKVLFKAQLEKAGVEHQLRREVEIQSHLRHPNILRLYGYFHDATRVYLILEYAPLGTVYRELQKLSKFDEQRTATYITELANALSYCHSKRVIHRDIKPENLLLGSAGELKIADFGWSVHAPSSRRTTLCGTLDYLPPEMIEGRMHDEKVDLWSLGVLCYEFLVGKPPFEANTYQETYKRISRVEFTFPDFVTEGARDLISRLLKHNPSQRPMLREVLEHPWITANSSKPSNCQNKESASKQS

SEQ ID NO: 32766 - protein, 18 aa, Homo sapiens
IPSASFYSLWSLWVRKGH

SEQ ID NO: 32767 - protein, 18 aa, Homo sapiens
IPSLQPVQLSTWLTLGTQ

SEQ ID NO: 32768 - protein, 61 aa, Homo sapiens
VLVPSDNFTITFHHCMSGREQVSLVDPEYLPRRHEQHQFWPLHPDLEHQSCLGANDHTSQL

SEQ ID NO: 32769 - protein, 43 aa, Homo sapiens
LPTGSSAPSGTGTTSPALSSPSRSPLALRVAGAISMNLGSSGT

SEQ ID NO: 32770 - protein, 148 aa, Homo sapiens
MELAPNFQGYFTPLNTPQSYETLEELVSATTQSSKQLPTCFMSTHRIVTEGRVVTEDQLLMLEAVVMHLGIRSARCVLGMEGQQVILHLPLSQKGPFWTWEPSAPRTLLQVLQDPALKDLVLTCPTLPWHSLILRPQYEIQAIMHTAE

SEQ ID NO: 32771 - protein, 517 aa, Homo sapiens
MAQVLHQIDAAWFNESWLSRIKEDVGDNWRIKASNVKKVLQGIMSYYHEFLGQQISEALIPDLNQITECSDPVELGRLLQLILGCAINCEKKQEHIQNIMTLEESVQHVVMTAIQELMSKEILSSPPNDAVGELEQQLKRALEELQEALAEKEELRQRCEELDMQVTTLQDEKNSLVSENEMMNEKLDQLDGSFDDPNTVVAKKYFHAQLQLEQLQEENFRLEAAKDDYRVHCEELEKQLIEFQHRNDELTSLAEETRALKDEIDVLRATSDKANKLESTVEIYRQKLQDLNDLRKQVKTLQETNMMYMHNTVSLEEELKKANAARTQLETYKRQVQDLHVKLSSESKRADTLAFEMKRLEEKHEALLKEKERLIEQRDTLKETNEELRCSQVQQDHLNQTDASATKSYENLAAEIMPVEYREVFIRLQHENKMLRLQQEGSENERIEELQEQLEQKHRKMNELETEQRLSKERIRELQQQIEDLQKSLQEQGSKSEGESYKRSMNLKLLFRRKMKI

SEQ ID NO: 32772 - protein, 169 aa, Homo sapiens
MLLQREPRLGELRVFDQHLGPWLEELKTGPVRVTAIQGDVTQAHEVAAAVAGAHVVIHTAGLVDVFGRASPKTIHEVNVQGTRNVIEACVQTGTRFLVYTSSMEVVGPNTKGHPFYRGNEDTPYEAVHRHPYPCSKALAEWLVLEANGRKAMLPGCTCWQPGSWSSGQP

SEQ ID NO: 32773 - protein, 30 aa, Homo sapiens
MSIMTTELQSLCSLLQESKEEAIRTLQRKM

SEQ ID NO: 32774 - protein, 73 aa, Homo sapiens
MTLQPRCEDVETAEGVALTVTGVAQVKIMTEKELLAVACEQFLGKNVQDIKNVVLQTLEGHLRSILGEALFSL

SEQ ID NO: 32775 - protein, 184 aa, Homo sapiens
MEAGIHYVEAVFSMGPVTPAHAGAYRCCGCFSHSRYEWSAPSDPLDIVITGKYKKPSLSTQVDPMMRLGEKLTLFCSSEISFDQYHLFRHGVAHGQWLSGGQRHREAFQANFSVGRATPVPGGTYRCYGSFNDSPYKPPVTRCNFTPQETLRVLLCHSQNPPLNLTHLALKDSPATCICSLDSQ

SEQ ID NO: 32776 - protein, 42 aa, Homo sapiens
RVSEIEVSWYCAFLFLADSPNGHGLVASGPPVSRSRYQDPTQ

SEQ ID NO: 32777 - protein, 8 aa, Homo sapiens
ISLYTLMD

SEQ ID NO: 32778 - protein, 6 aa, Homo sapiens
RTMKGS

SEQ ID NO: 32779 - protein, 10 aa, Homo sapiens
LISGSTKGPS

SEQ ID NO: 32780 - protein, 43 aa, Homo sapiens
MTNMFCTRHEGTDSTVFLPHSHNISEWISRHIPFGFLHLCSYE

SEQ ID NO: 32781 - protein, 18 aa, Homo sapiens
LGESGGAVSSVPLEPMVH

SEQ ID NO: 32782 - protein, 57 aa, Homo sapiens
LTLFLAMSSHKTFTIKRFLAKKQKQNRPIPQWIQMKPGSKIRYNSKRRHWRRTKLGL

SEQ ID NO: 32783 - protein, 71 aa, Homo sapiens
ISIFLMIGKECQDGIFFWQDALVVQSLKILGTIFCIDSYTTKEYTSIFIKFIMSFRLHLEWKLNMHILWRL

SEQ ID NO: 32784 - protein, 428 aa, Homo sapiens
VGDLKQALPCVAESPTVHVEVHQRGSSTAKKEDINLSVRKLLNRHNIVFGDYTWTEFDEPFLTRNVQSVSIIDTELKVKDSQPIDLSACTVALHIFQLNEDGPSSENLEEETENIIAANHWVLPAAEFHGLWDSLVYDVEVKSHLLDYVMTTLLFSDKNVNSNLITWNRVVLLHGPPGTGKTSLCKALAQKLTIRLSSRYRYGQLIEINSHSLFSKWFSESGKLVTKMFQKIQDLIDDKDALVFVLIDEVESLTAARNACRAGTEPSDAIRVVNAVLTQIDQIKRHSNVVILTTSNITEKIDVAFVDRADIKQYIGPPSAAAIFKIYLSCLEELMKCQIIYPRQQLLTLRELEMIGFIENNVSKLSLLLNDISRKSEGLSGRVLRKLPFLAHALYVQAPTVTIEGFLQALSLAVDKQFEERKKLAAYI

SEQ ID NO: 32785 - protein, 15 aa, Homo sapiens
LILPRCISQKTLIHR

SEQ ID NO: 32786 - protein, 78 aa, Homo sapiens
LQAPCFHIFPLTVSCCCCCYYLQGPQKWNTERRSVRMPICPASTPQPPQGTSCPSAGAKEPVLCLNVATWCSGLMKGM

SEQ ID NO: 32787 - protein, 17 aa, Homo sapiens
MCSSMGTHLSPFKGTLL

SEQ ID NO: 32788 - protein, 7 aa, Homo sapiens
TSVFPFC

SEQ ID NO: 32789 - protein, 22 aa, Homo sapiens
RSCFCSTPGSDSAQGSDVSLTA

SEQ ID NO: 32790 - protein, 43 aa, Homo sapiens
KNWGARSARWRASGGLFGGVFRICSSRKRDVEAATQTSQTRAS

SEQ ID NO: 32791 - protein, 39 aa, Homo sapiens
VQRSLARRIAESSPLFTTWSRFILPYPVFGFLSSPSSLC

SEQ ID NO: 32792 - protein, 742 aa, Homo sapiens
IATTLLEYGADANAVTRQGIASVHLAAQEGHVDMVSLLLGRNANVNLSNKSGLTPLHLAAQEDRVNVAEVLVNQGAHVDAQTKMGYTPLHVGCHYGNIKIVNFLLQHSAKVNAKTKNGYTPLHQAAQQGHTHIINVLLQNNASPNELTVNGNTALGIARRLGYISVVDTLKIVTEETMTTTTVTEKHKMNVPETMNEVLDMSDDEGEDAMTGDTDKYLGPQDLKELGDDSLPAEGYMGFSLGARSASPKISSDRSYTLNRSSYARDSMMIEELLVPSKEQHLTFTREFDSDSLRHYSWAADTLDNVNLVSSPIHSGYSSPLPQYDSRFLVSFMVDARGGSMRGSRHHGMRIIIPPRKCTAPTRITCRLVKRHKLANPPPMVEGEGLASRLVEMGPAGAQFLGPVIVEIPHFGSMRGKERELIVLRSENGETWKEHQFDSKNEDLTELLNGMDEELDSPEELGKKRICRIITKDFPQYFAVVSRIKQESNQIGPEGGILSSTTVPLVQASFPEGALTKRIRVGLQAQPVPDEIVKKILGNKATFSPIVTVEPRRRKFHKPITMTIPVPPPSGEGVSNGYKGDTTPNLRLLCSITGGTSPAQWEDITGTTPLTFIKDCVSFTTNVSARFWLADCHQVLETVGLATQLYRELICVPYMAKFVVFAKMNDPVESSLRCFCMTDDKVDKTLEQQENFEEVARSKDIEVPCSQKQVHFITYSRYEVLFCGLNSTHYKIPSALLILLLL

SEQ ID NO: 32793 - protein, 754 aa, Homo sapiens
ILVSPSYRVVEVSYILFELIMNSMKTEENKSFSAMEDDQRTRPEVSKDTVMKQTHADTPVDHCLSGIRKCSSTFKLKSEVNKHETALEMQNPNLNNKECCFTFTLNGNSRKLDRSVFTAYGKPSESIYSALSANDYFSERIKNQFNKNIIVYEEKTIDGHINLGMPLKCLPSDSHFKITFGQRKSSKEDGHILRQCENPNMECILFHVVAIGRTRKKIVKINELHEKGSKLCIYALKGETIEGALCKDGRFRSDIGEFEWKLKEGHKKIYGKQSMVDEVSGKVLEMDISKKKALQQKDIHKKIKQNESATDEINHQSLIQSKKKVHKPKKDGETKDVEHSREQILPPQDLSHYIKDKTRQTIPRIRNYYFCSLPRKYRQINSQVRRRPHLGRRYAINLDVQKEAINLLKNYQTLNEAIMHQYPNFKEEAQWVRKYFREEQKRMNLSPAKQFNIYKKDFGKMTANSVSVATCEQLTYYSKSVGFMQWDNNGNTGNATCFVFNGGYIFTCRHVVHLMVGKNTHPSLWPDIISKCAKVTFTYTEFCPTPDNWFSIEPWLKVSNENLDYAILKLKENGNAFPPGLWRQISPQPSTGLIYLIGHPEGQIKKIDGCTVIPLNERLKKYPNDCQDGLVDLYDTTSNVYCMFTQRSFLSEVWNTHTLSYDTCFSDGSSGSPVFNASGKLVALHTFGLFYQRGFNVHALIEFGYSMDSILCDIKKTNESLYKSLNDEKLETYDEEKGKQESSLQDHQIEPMEC

SEQ ID NO: 32794 - protein, 65 aa, Homo sapiens
TASQPRRPLCSVCSPPRPCSVPWDTPAPTSSGCLICPAFQLSSGFRPLVIPPHPLSKALSWSPFF

SEQ ID NO: 32795 - protein, 443 aa, Homo sapiens
VQREPPALLLSRLPQPLASAWVRRGGIKPRSESGSFARGALGLCLPRGASGRHPALSRSSTPMIDTLRPVPFASEMAISKTVAWLNEQLELGNERLLLMDCRPQELYESSHIESAINVAIPGIMLRRLQKGNLPVRALFTRGEDRDRFTRRCGTDTVVLYDESSSDWNENTGGESVLGLLLKKLKDEGCRAFYLEGGFSKFQAEFSLHCETNLDGSCSSSSPPLPVLGLGGLRISSDSSSDIESDLDRDPNSATDSDGSPLSNSQPSFPVEILPFLYLGCAKDSTNLDVLEEFGIKYILNVTPNLPNLFENAGEFKYKQIPISDHWSQNLSQFFPEAISFIDEARGKNCGVLVHCLAGISRSVTVTVAYLMQKLNLSMNDAYDIVKMKKSNISPNFNFMGQLLDFERTLGLSSPCDNRVPAQQLYFTTPSNQNVYQVDSLQST

SEQ ID NO: 32796 - protein, 22 aa, Homo sapiens
VRKKVLAPRVNLTFRKILLTKK

SEQ ID NO: 32797 - protein, 273 aa, Homo sapiens
LELVLLMGNYMNAGSRNAQTFGFNLSSLCKLKDTKSADQKTTLLHFLVEICEEKYPDILNFVDDLEPLDKASKVSVETLEKNLRQMGRQLQQLEKELETFPPPEDLHDKFVTKMSRFVISAKEQYETLSKLHENMEKLYQSIIGYYAIDVKKVSVEDFLTDLNNFRTTFMQAIKENIKKREAEEKEKRVRIAKELAERERLERQQKKKRLLEMKTEGDETGVMDNLLEALQSGAAFRDRRKRTPMPKDVRQSLSPMSQRPVLKVCNHGNKPYL

SEQ ID NO: 32798 - protein, 64 aa, Homo sapiens
TLVPGSVPRERSTPCLILPEDGATGGCGIRAPCPALCLPAQAGHSAGRPPSAAHRGQPCGQEPL

SEQ ID NO: 32799 - protein, 28 aa, Homo sapiens
VIHLPSIAGISNRDDHPLSRGAGLPQVQ

SEQ ID NO: 32800 - protein, 87 aa, Homo sapiens
IRLKQKRRTLKNRGYAQSCRFKRVQQRHVLESEKNQLLQQVDHLKQEISRLVRERDAYKEKYEKLVSSGFRENGSSSDNPSSPEFFM

SEQ ID NO: 32801 - protein, 35 aa, Homo sapiens
LHNPEFRSIERHHLSISYLPPRTLQCKTTVLHFGK

SEQ ID NO: 32802 - protein, 764 aa, Homo sapiens
ILLLLHPKAPMESSDVELDLQRSVQAVLRELSTQAPALQSNQGMWRWSLHKKVERDPGKSPVLVRILLRELEKAESQDLRHVIIPLLHTVMYVLTKATGITEELYQRIYAFCTRLLTLPTPYCTVALDCAIRLKTEMAVPGTLYQRMVIAEQNLTNELYPYQERVFLFVDPELVSASVCSALLLEIEAAQAQQTPETCMRHVVSHALQAALGEACHAGALHRKLQASPRRTLEHYFHAVVAALEQMASEASPSREGHVERLEEIYCSLLGPAAGRCGGDLVQERPPSIPLPSPYITFHLWTGEEQLWKELVLFLRPRSQLRLSADLEVLDLQGLRPDRELARVSVLSTDSGIERDLPTGADELPAPGSPEMERAGLQRKGGIKKRAWPLDFLMPGSWDGPPGLHRRTGRPSGDGEMLPGVSRLHTARVLVLGDDRMLGRLAQAYHRLRKRETQKFCLTPRLSLQLYYIPVLAPEKPAASRQPELGELATFLGRVDPWYQSNVNTLCPAIHKLAEMPPSLDTSRTVDPFILDVITYYIRMGTQPIYFQIYTVKIFFSDLSQDPTEDIFLIELKVKIQDSKFPKDGFSPRRRGVAEGPGAELSLCYQKALLSHRPREVTVSLRATGLILKAIPASDTEVSGSSHCPLPAAPVTDHTCLNVNVTEVVKSSNLAGKSFSTVTNTFRTNNIQIQSRDQRLLTLSLDKDDQRTFRDVVRFEVAPCPEPCSGAQKSKAPWLNLHGQQEVEAIKAKPKPLLMPINTFSGIVQ

SEQ ID NO: 32803 - protein, 20 aa, Homo sapiens
LPATKAPFSPRSRTRQPGRS

SEQ ID NO: 32804 - protein, 7 aa, Homo sapiens
LISPGCL

SEQ ID NO: 32805 - protein, 98 aa, Homo sapiens
RHWHSYSEGLGHPRVSQVTFPPPQEAMTEAGKLPLPLPPRLDWFVHTQMGQLAQDGVPEWFHGAISREDAENLLESQPLGSFLIRVSHSHVGYTLSYK

SEQ ID NO: 32806 - protein, 66 aa, Homo sapiens
TATEWAEILALQKQFHSVEVHKWRQILRASVELLDEMKFSLEKLHQGITVSDPPFDTQPRPDDSFS

SEQ ID NO: 32807 - protein, 56 aa, Homo sapiens
VRGYLIRNFSEGRARWLMPVIPAFSEAEASWTDLKKTAFQDLLRLQLQLEVQNVFS

SEQ ID NO: 32808 - protein, 210 aa, Homo sapiens
LWPEAQIRNTMALLTAETFRLQFNNKRRLRRPYYPRKALLCYQLTPQNGSTPTRGYFENKKKCHAEICFINEIKSMGLDETQCYQVTCYLTWSPCSSCAWELVDFIKAHDHLNLGIFASRLYYHWCKPQQKGLRLLCGSQVPVEVMGFPEFADCWENFVDHEKPLSFNPYKMLEELDKNSRAIKRRLERIKIPGVRAQGRYMDILCDAEV

SEQ ID NO: 32809 - protein, 147 aa, Homo sapiens
LLLAPWPAGLFLAMGRSRRTGAHRAHSLARQMKAKRRRPDLDEIHRELRPQGSARPQPDPNAEFDPDLPGGGLHRCLACARYFIDSTNLKTHFRSKDHKKRLKQLSVEPYSQEEAERAAGMGSYVPPRRLAVPTEVSTEVPEMDTST

SEQ ID NO: 32810 - protein, 30 aa, Homo sapiens
TATLTVWFQTPVPGWIPAIHAPSLISRSSQ

SEQ ID NO: 32811 - protein, 36 aa, Homo sapiens
KRCSLLGRGPGGEGPALPRRRPLAASPGLRAMPRAV

SEQ ID NO: 32812 - protein, 17 aa, Homo sapiens
LLARTRRVFPPTASRWW

SEQ ID NO: 32813 - protein, 65 aa, Homo sapiens
VWPGPQGQELLPVAQATLHPQLGALPPWGRAKPSSWLGSHGGLVGHRSWGIEVTGPVPWGSGHEV

SEQ ID NO: 32814 - protein, 13 aa, Homo sapiens
ILKYFVTQIIAIR

SEQ ID NO: 32815 - protein, 60 aa, Homo sapiens
RPPRFKIMPAAPARPCNGERSSWGWCSSGLASMEYCGSSSGWGPAWASTSAFRSASASSV

SEQ ID NO: 32816 - protein, 70 aa, Homo sapiens
IWLSGAASSSARTRGRLPALFAGRALGRHKTKEWPPRPREAARLSQPALRGPASRKSPSKGTSLQGSQHL

SEQ ID NO: 32817 - protein, 35 aa, Homo sapiens
VAASQPSLPDELWAATRLRNGHPAQEKLPVFLSQL

SEQ ID NO: 32818 - protein, 28 aa, Homo sapiens
LGSQKIGNSYQHGKPIENSGDWLLVSST

SEQ ID NO: 32819 - protein, 231 aa, Homo sapiens
LGLLQKEKVAVEAFQICCLLLPPENRRKLQLLMRMMARICLNKEMPPLCDGFGTRTLMVQTFSRCILCSKDEVDLDELLAARLVTFLMDNYQEILKVPLALQTSIEERVAHLRRVQIKYPGADMDITLSAPSFCRQISPEEFEYQRSYGSQEPLAALLEEVITDAKLSNKEKKKKLKQFQKSYPEVYQERFPTPESAALLFPEKPKPKPQLLMWALKKPFQPFQRTRSFRM

SEQ ID NO: 32820 - protein, 84 aa, Homo sapiens
RAQAETPCSCRRRHRAAAVLTDPPPGPPPCRAAVGRRSPPRRPGLPKQESSFPWGGCCGTSRKATPSTGLEWGHPCTWPPSWNT

SEQ ID NO: 32821 - protein, 6 aa, Homo sapiens
KMAAPM

SEQ ID NO: 32822 - protein, 12 aa, Homo sapiens
RASEMITSQIRQ

SEQ ID NO: 32823 - protein, 20 aa, Homo sapiens
MERSANAAARRATLCMCTRC

SEQ ID NO: 32824 - protein, 28 aa, Homo sapiens
ISRGPAPGAHLVPFRPSRPPALTPGPVP

SEQ ID NO: 32825 - protein, 28 aa, Homo sapiens
IASSEKSSIHFLPNSIPWACHSIWEKSN

SEQ ID NO: 32826 - protein, 25 aa, Homo sapiens
IRAETRLVIWRLRLARDKRHGQSTG

SEQ ID NO: 32827 - protein, 20 aa, Homo sapiens
REGKHKAGYALRDNKSNPQT

SEQ ID NO: 32828 - protein, 44 aa, Homo sapiens
LPCTALLEATWRVRPRGGHGHKCPQLAPGCQRRYSPDQGRIISG

SEQ ID NO: 32829 - protein, 41 aa, Homo sapiens
KHKATAQEKPQESRRRGRIFSTQETNTISRQSHGHTKTSSK

SEQ ID NO: 32830 - protein, 41 aa, Homo sapiens
TQSPFACGWTTRRTTSTRGTIMASPPCTGPAERAALLWLRC

SEQ ID NO: 32831 - protein, 717 aa, Homo sapiens
LLLHFGQKFKDTVMKQTHADTPVDHCLSGIRKCSSTFKLKSEVNKHETALEMQNPNLNNKECCFTFTLNGNSRKLDRSVFTAYGKPSESIYSALSANDYFSERIKNQFNKNIIVYEEKTIDGHINLGMPLKCLPSDSHFKITFGQRKSSKEDGHILRQCENPNMECILFHVVAIGRTRKKIVKINELHEKGSKLCIYALKGETIEGALCKDGRFRSDIGEFEWKLKEGHKKIYGKQSMVDEVSGKVLEMDISKKKALQQKDIHKKIKQNESATDEINHQSLIQSKKKVHKPKKDGETKDVEHSREQILPPQDLSHYIKDKTRQTIPRIRNYYFCSLPRKYRQINSQVRRRPHLGRRYAINLDVQKEAINLLKNYQTLNEAIMHQYPNFKEEAQWVRKYFREEQKRMNLSPAKQFNIYKKDFGKMTANSVSVATCEQLTYYSKSVGFMQWDNNGNTGNATCFVFNGGYIFTCRHVVHLMVGKNTHPSLWPDIISKCAKVTFTYTEFCPTPDNWFSIEPWLKVSNENLDYAILKLKENGNAFPPGLWRQISPQPSTGLIYLIGHPEGQIKKIDGCTVIPLNERLKKYPNDCQDGLVDLYDTTSNVYCMFTQRSFLSEVWNTHTLSYDTCFSDGSSGSPVFNASGKLVALHTFGLFYQRGFNVHALIEFGYSMDSILCDIKKTNESLYKSLNDEKLETYDEEKGKQESSLQDHQIEPMEC

SEQ ID NO: 32832 - protein, 757 aa, Homo sapiens
INSILVSPSYRVVEVSYILFELIMNSMKTEENKSFSAMEDDQRTRPEVSKDTVMKQTHADTPVDHCLSGIRKCSSTFKLKSEVNKHETALEMQNPNLNNKECCFTFTLNGNSRKLDRSVFTAYGKPSESIYSALSANDYFSERIKNQFNKNIIVYEEKTIDGHINLGMPLKCLPSDSHFKITFGQRKSSKEDGHILRQCENPNMECILFHVVAIGRTRKKIVKINELHEKGSKLCIYALKGETIEGALCKDGRFRSDIGEFEWKLKEGHKKIYGKQSMVDEVSGKVLEMDISKKKALQQKDIHKKIKQNESATDEINHQSLIQSKKKVHKPKKDGETKDVEHSREQILPPQDLSHYIKDKTRQTIPRIRNYYFCSLPRKYRQINSQVRRRPHLGRRYAINLDVQKEAINLLKNYQTLNEAIMHQYPNFKEEAQWVRKYFREEQKRMNLSPAKQFNIYKKDFGKMTANSVSVATCEQLTYYSKSVGFMQWDNNGNTGNATCFVFNGGYIFTCRHVVHLMVGKNTHPSLWPDIISKCAKVTFTYTEFCPTPDNWFSIEPWLKVSNENLDYAILKLKENGNAFPPGLWRQISPQPSTGLIYLIGHPEGQIKKIDGCTVIPLNERLKKYPNDCQDGLVDLYDTTSNVYCMFTQRSFLSEVWNTHTLSYDTCFSDGSSGSPVFNASGKLVALHTFGLFYQRGFNVHALIEFGYSMDSILCDIKKTNESLYKSLNDEKLETYDEEKGKQESSLQDHQIEPMEC

SEQ ID NO: 32833 - protein, 8 aa, Homo sapiens
ITSTNTSS

SEQ ID NO: 32834 - protein, 23 aa, Homo sapiens
LQGAGGHVGCVFGGLPGYKNGCG

SEQ ID NO: 32835 - protein, 31 aa, Homo sapiens
LMESTFMHIKSFSRFDVSIFVRHWKITRMIL

SEQ ID NO: 32836 - protein, 34 aa, Homo sapiens
IRIPRKSNGIRGFLLTWRRDGNTSTSVQQTTSSL

SEQ ID NO: 32837 - protein, 73 aa, Homo sapiens
LSPSTATLMNGRYGRAALTQFCTLTCGGGQTSCWWLLLMPTLWGRWPVASVTTCLPASCGPGTAASPCSSARP

SEQ ID NO: 32838 - protein, 861 aa, Homo sapiens
VEPAAMKSARAKTPRKPTVKKGSQTNLKDPVGVYCRVRPLGFPDQECCIEVINNTTVQLHTPEGYRLNRNGDYKETQYSFKQVFGTHTTQKELFDVVANPLVNDLIHGKNGLLFTYGVTGSGKTHTMTGSPGEGGLLPRCLDMIFNSIGSFQAKRYVFKSNDRNSMDIQCEVDALLERQKREAMPNPKTSSSKRQVDPEFADMITVQEFCKAEEVDEDSVYGVFVSYIEIYNNYIYDLLEEVPFDPIKPKPPQSKLLREDKNHNMYVAGCTEVEVKSTEEAFEVFWRGQKKRRIANTHLNRESSRSHSVFNIKLVQAPLDADGDNVLQEKEQITISQLSLVDLAGSERTNRTRAEGNRLREAGNINQSLMTLRTCMDVLRENQMYGTNKMVPYRDSKLTHLFKNYFDGEGKVRMIVCVNPKAEDYEENLQVMRFAEVTQEVEVARPVDKAICGLTPGRRYRNQPRGPVGNEPLVTDVVLQSFPPLPSCEILDINDEQTLPRLIEALEKRHNLRQMMIDEFNKQSNAFKALLQEFDNAVLSKENHMQGKLNEKEKMISGQKLEIERLEKKNKTLEYKIEILEKTTTIYEEDKRNLQQELETQNQKLQRQFSDKRRLEARLQGMVTETTMKWEKECERRVAAKQLEMQNKLWVKDEKLKQLKAIVTEPKTEKPERPSRERDREKVTQRSVSPSPVPLLFQPDQNAPPIRLRHRRSRSAGDRWVDHKPASNMQTETVMQPHVPHAITVSVANEKALAKCEKYMLTHQELASDGEIETKLIKGDIYKTRGGGQSVQFTDIETLKQESPNGSRKRRSSTVAPAQPDGAESEWTDVETRCSVAVEMRAGSQLGPGYQHHAQPKRKKP

SEQ ID NO: 32839 - protein, 39 aa, Homo sapiens
IQLFICFESSGCKSMQLSYTGEDSFHVNIHILWGNLLPK

SEQ ID NO: 32840 - protein, 36 aa, Homo sapiens
RAWSISCAERSKSRPTCTIPTSCVSTTIFMTGGGST

SEQ ID NO: 32841 - protein, 78 aa, Homo sapiens
KSFWQKVCGMRTSALLQGITETIFYGAFSKSKPGTIGIFSPKGETLDRTALMIITAGLLACPSHPMHPFCQIIRMRVF

SEQ ID NO: 32842 - protein, 81 aa, Homo sapiens
KSFWQKVCGMRTSALLQGITETIFYGAFSKSKPGTIGIFSPKGETLDRTALMIITAGLLACPSHPMHPFCQIIRMREWKTS

SEQ ID NO: 32843 - protein, 16 aa, Homo sapiens
LTSMEMARSIMKSLYR

SEQ ID NO: 32844 - protein, 87 aa, Homo sapiens
LEPTPPPSCRPCPRAMGCGGSRCSSPTSGTVRAKRRKLRESTRNWPTSAPSSKETKPWMATVRKNMCVNCFSSSCLAMTLTLGTWRL

SEQ ID NO: 32845 - protein, 54 aa, Homo sapiens
IRAPRTYPSNSNSPPRTPATASKTNFSYCKLSTTASSSNVTSWPVRSQRCSVTM

SEQ ID NO: 32846 - protein, 140 aa, Homo sapiens
LGRHEQVVERLLETQDGAEKQLREILTMEKEVAQSLLNAKEQVHQGGVELQQLEAGLQEAGEEDTRLKASLLQLTRELEELKEIEADLERQEKEVDEDTTVTIPSAVYVAQLYHQVSKIEWDYECEPGMVKGSILFGEPF

SEQ ID NO: 32847 - protein, 11 aa, Homo sapiens
TRVHACDRPCV

SEQ ID NO: 32848 - protein, 40 aa, Homo sapiens
RPSRERHGGPGAAAAAGAAGRAGGALRRHGLRYEGGDRAE

SEQ ID NO: 32849 - protein, 10 aa, Homo sapiens
LPSSPLAMVS

SEQ ID NO: 32850 - protein, 14 aa, Homo sapiens
RLSMRRKSKRCAGS

SEQ ID NO: 32851 - protein, 58 aa, Homo sapiens
VTTRLSPEAAAAAPSPRTRDPPARGRNVAEVLLKGPEMQGFGIHFEPLSCLTLTSFHY

SEQ ID NO: 32852 - protein, 70 aa, Homo sapiens
IMGTVKAQKEKRFLFWWGFVSEFWPMEPRGGLAQNISLWILSSGNWMPTRRVILESCVGDHKAFVSQVPE

SEQ ID NO: 32853 - protein, 60 aa, Homo sapiens
RMPLSRWLRSVGVFLLPAPYWAPRERWLGSLRRPSLVHGYPVLAWHSARCWCQAWTEEPR

SEQ ID NO: 32854 - protein, 48 aa, Homo sapiens
ICACPAVPAVAKVSSMDKCLHEGSAVPAPRLCPTTDSAKDQNSCETNS

SEQ ID NO: 32855 - protein, 365 aa, Homo sapiens
LDMEDLEEDVRFIVDETLDFGGLSPSDSREEEDITVLVTPEKPLRRGLSHRSDPNAVAPAPQGVRLSLGPLSPEKLEEILDEANRLAAQLEQCALQDRESAGEGLGPRRVKPSPRRETFVLKDSPVRDLLPTVNSLTRSTPSPSSLTPRLRSNDRKGSVRALRATSGKRPSNMKRESPTCNLFPASKSPASSPLTRSTPPVRGRAGPSGRAAASEETRAAKLRVSGSGEFVGLTLKFLHPSPPGPPTPIRSVLAPQPSTSNSQRLPRPQGAAAKSSSQLPIPSAIPRPASRMPLTSRSVPPGRGALPPDSLSTRKGLPRPSTAGHRVRESGHKVPVSQRLNLPVMGATRSNLQPPRKVAVPGPTR

SEQ ID NO: 32856 - protein, 73 aa, Homo sapiens
RCPTSGFSVNSKRASKTKHCRTQSAGKWTQGSCFPATKSSCHGCHSQQSAAPQESGSPRTYQVKRSGQQARLQ

SEQ ID NO: 32857 - protein, 1633 aa, Homo sapiens
RNMERRAAGPGWAAYERLTAEEMDEQRRQNVAYQYLCRLEEAKRWMEACLKEELPSPVELEESLRNGVLLAKLGHCFAPSVVPLKKIYDVEQLRYQATGLHFRHTDNINFWLSAIAHIGLPSTFFPETTDIYDKKNMPRVVYCIHALSLFLFRLGLAPQIHDLYGKVKFTAEELSNMASELAKYGLQLPAFSKIGGILANELSVDEAAVHAAVLAINEAVERGVVEDTLAALQNPSALLENLREPLAAVYQEMLAQAKMEKAANARNHDDRESQDIYDHYLTQAEIQGNINHVNVHGALEVVDDALERQSPEALLKALQDPALALRGVRRDFADWYLEQLNSDREQKAQELGLVELLEKEEVQAGVAAANTKGDQEQAMLHAVQRINKAIRRRVAADTVKELMCPEAQLPPVYPVASSMYQLELAVLQQQQGELGQEELFVAVEMLSAVVLINRALEARDASGFWSSLVNPATGLAEVEGENAQRYFDALLKLRQERGMGEDFLSWNDLQATVSQVNAQTQEETDRVLAVSLINEALDKGSPEKTLSALLLPAAGLDDVSLPVAPRYHLLLVAAKRQKAQVTGDPGAVLWLEEIRQGVVRANQDTNTAQRMALGVAAINQAIKEGKAAQTERVLRNPAVALRGVVPDCANGYQRALESAMAKKQRPADTAFWVQHDMKDGTAYYFHLQTFQGIWEQPPGCPLNTSHLTREEIQSAVTKVTAAYDRQQLWKANVGFVIQLQARLRGFLVRQKFAEHSHFLRTWLPAVIKIQAHWRGYRQRKIYLEWLQYFKANLDAIIKIQAWARMWAARRQYLRRLHYFQKNVNSIVKIQAFFRARKAQDDYRILVHAPHPPLSVVRRFAHLLNQSQQDFLAEAELLKLQEEVVRKIRSNQQLEQDLNIMDIKIGLLVKNRITLQEVVSHCKKLTKRNKEQLSDMMVLDKQKGLKSLSKEKRQKLEAYQHLFYLLQTQPIYLAKLIFQMPQNKTTKFMEAVIFSLYNYASSRREAYLLLQLFKTALQEEIKSKVEQPQDVVTGNPTVVRLVVRFYRNGRGQSALQEILGKVIQDVLEDKVLSVHTDPVHLYKNWINQTEAQTGQRSHLPYDVTPEQALSHPEVQRRLDIALRNLLAMTDKFLLAITSSVDQIPYGMRYVAKVLKATLAEKFPDATDSEVYKVVGNLLYYRFLNPAVVAPDAFDIVAMAAGGALAAPQRHALGAVAQLLQHAAAGKAFSGQSQHLRVLNDYLEETHLKFRKFIHRACQVPEPEERFAVDEYSDMVAVAKPMVYITVGELVNTHRLLLEHQDCIAPDHQDPLHELLEDLGELPTIPDLIGESIAADGHTDLSKLEVSLTLTNKFEGLEADADDSNTRSLLLSTKQLLADIIQFHPGDTLKEILSLSASREQEAAHKQLMSRRQACTAQTPEPLRRHRSLTAHSLLPLAEKQRRVLRNLRRLEALGLVSARNGYQGLVDELAKDIRNQHRHRHRRKAELVKLQATLQGLSTKTTFYEEQGDYYSQYIRACLDHLAPDSKSSGKGKKQPSLHYTAAQLLEKGVLVEIEDLPASHFRNVIFDITPGDEAGKFEVNAKFLGVDMERFQLHYQDLLQLQYEGVAVMKLFNKAKVNVNLLIFLLNKKFLRK

SEQ ID NO: 32858 - protein, 15 aa, Homo sapiens
VQLPQMWEARLHNLW

SEQ ID NO: 32859 - protein, 40 aa, Homo sapiens
KTRTHMNKEGNSKTSRQMDTLDTVKSNRRRQTVGGCAHVR

SEQ ID NO: 32860 - protein, 3484 aa, Homo sapiens
RRGLESAMANRRVGRGCWEVSPTERRPPAGLRGPAAEEEASSPPVLSLSHFCRSPFLCFGDVLLGASRTLSLALDNPNEEVAEVKISHFPAADLGFSVSQRCFVLQPKEKIVISVNWTPLKEGRVREIMTFLVNDVLKHQAILLGNAEEQKKKKRSLWDTIKKKKISASTSHNRRVSNIQNVNKTFSVSQKVDRVRSPLQACENLAMNEGGPPTENNSLILEENKIPISPISPAFNECHGATCLPLSVRRSTTYSSLHASENRELLNVHSANVSKVSFNEKAVTETSFNSVNVNGQRGENSKLSLTPNCSSTLNITQSQIHFLSPDSFVNNSHGANNELELVTCLSSDMFMKDNSQPVHLESTIAHEIYQKILSPDSFIKDNYGLNQDLESESVNPILSPNQFLKDNMAYMCTSQQTCKVPLSNENSQVPQSPEDWRKSEVSPRIPECQGSKSPKAIFEELVEMKSNYYSFIKQNNPKFSAVQDISSHSHNKQPKRRPILSATVTKRKATCTRENQTEINKPKAKRCLNSAVGEHEKVINNQKEKEDFHSYLPIIDPILSKSKSYKNEVTPSSTTASVARKRKSDGSMEDANVRVAITEHTEVREIKRIHFSPSEPKTSAVKKTKNVTTPISKRISNREKLNLKKKTDLSIFRTPISKTNKRTKPIIAVAQSSLTFIKPLKTDIPRHPMPFAAKNMFYDERWKEKQEQGFTWWLNFILTPDDFTVKTNISEVNAATLLLGIENQHKISVPRAPTKEEMSLRAYTARCRLNRLRRAACRLFTSEKMVKAIKKLEIEIEARRLIVRKDRHLWKDVGERQKVLNWLLSYNPLWLRIGLETTYGELISLEDNSDVTGLAMFILNRLLWNPDIAAEYRHPTVPHLYRDGHEEALSKFTLKKLLLLVCFLDYAKISRLIDHDPCLFCKDAEFKASKEILLAFSRDFLSGEGDLSRHLGLLGLPVNHVQTPFDEFDFAVTNLAVDLQCGVRLVRTMELLTQNWDLSKKLRIPAISRLQKMHNVDIVLQVLKSRGIELSDEHGNTILSKDIVDRHREKTLRLLWKIAFAFQVDISLNLDQLKEEIAFLKHTKSIKKTISLLSCHSDDLINKKKGKRDSGSFEQYSENIKLLMDWVNAVCAFYNKKVENFTVSFSDGRVLCYLIHHYHPCYVPFDAICQRTTQTVECTQTGSVVLNSSSESDDSSLDMSLKAFDHENTSELYKELLENEKKNFHLVRSAVRDLGGIPAMINHSDMSNTIPDEKVVITYLSFLCARLLDLRKEIRAARLIQTTWRKYKLKTDLKRHQEREKAARIIQLAVINFLAKQRLRKRVNAALVIQKYWRRVLAQRKLLMLKKEKLEKVQNKAASLIQGYWRRYSTRQRFLKLKYYSIILQSRIRMIIAVTSYKRYLWATVTIQRHWRAYLRRKQDQQRYEMLKSSTLIIQSMFRKWKQRKMQSQVKATVILQRAFREWHLRKQAKEENSAIIIQSWYRMHKELRKYIYIRSCVVIIQKRFRCFQAQKLYKRRKESILTIQKYYKAYLKGKIERTNYLQKRAAAIQLQAAFRRLKAHNLCRQIRAACVIQSYWRMRQDRVRFLNLKKTIIKFQAHVRKHQQRQKYKKMKKAAVIIQTHFRAYIFAMKVLASYQKTRSAVIVLQSAYRGMQARKMYIHILTSVIKIQSYYRAYVSKKEFLSLKNATIKLQSTVKMKQTRKQYLHLRAAALFIQQCYRSKKIAAQKREEYMQMRESCIKLQAFVRGYLVRKQMRLQRKAVISLQSYFRMRKARQYYLKMYKAIIVIQNYYHAYKAQVNQRKNFLQVKKAATCLQAAYRGYKVRQLIKQQSIAALKIQSAFRGYNKRVKYQSVLQSIIKIQRWYRAYKTLHDTRTHFLKTKAAVISLQSAYRGWKVRKQIRREHQAALKIQSAFRMAKAQKQFRLFKTAALVIQQNFRAWTAGRKQCMEYIELRHAVLVLQSMWKGKTLRRQLQRQHKCAIIIQSYYRMHVQQKKWKIMKKAALLIQKYYRAYSIGREQNHLYLKTKAAVVTLQSAYRGMKVRKRIKDCNKAAVTIQSKYRAYKTKKKYATYRASAIIIQRWYRGIKITNHQHKEYLNLKKTAIKIQSVYRGIRVRRHIQHMHRAATFIKAMFKMHQSRISYHTMRKAAIVIQVRCRAYYQGKMQREKYLTILKAVKVLQASFRGVRVRRTLRKMQTAATLIQSNYRRYRQQTYFNKLKKITKTVQQRYWAMKERNIQFQRYNKLRHSVIYIQAIFRGKKARRHLKMMHIAATLIQRRFRTLMMRRRFLSLKKTAILIQRKYRAHLCTKHHLQFLQVQNAVIKIQSSYRRWMIRKRMREMHRAATFIQSTFRMHRLHMRYQALKQASVVIQQQYQANRAAKLQRQHYLRQRHSAVILQAAFRGMKTRRHLKSMHSSATLIQSRFRSLLVRRRFISLKKATIFVQRKYRATICAKHKLYQFLHLRKAAITIQSSYRRLMVKKKLQEMQRAAVLIQATFRMYRTYITFQTWKHASILIQQHYRTYRAAKLQRENYIRQWHSAVVIQAAYKGMKARQLLREKHKASIVIQSTYRMYRQYCFYQKLQWATKIIQEKYRANKKKQKVFQHNELKKETCVQAGFQDMNIKKQIQEQHQAAIIIQKHCKAFKIRKHYLHLRATVVSIQRRYRKLTAVRTQAVICIQSYYRGFKVRKDIQNMHRAATLIQSFYRMHRAKVDYETKKTAIVVIQNYYRLYVRVKTERKNFLAVQKSVRTIQAAFRGMKVRQKLKNVSEEKMAAIVNQSALCCYRSKTQYEAVQSEGVMIQEWYKASGLACSQEAEYHSQSRAAVTIQKAFCRMVTRKLETQKCAALRIQFFLQMAVYRRRFVQQKRAAITLQHYFRTWQTRKQFLLYRKAAVVLQNHYRAFLSAKHQRQVYLQIRSSVIIIQARSKGFIQKRKFQEIKNSTIKIQAMWRRYRAKKYLCKVKAACKIQAWYRCWRAHKEYLAILKAVKIIQGCFYTKLERTRFLNVRASAIIIQRKWRAILPAKIAHEHFLMIKRHRAACLIQAHYRGYKGRQVFLRQKSAALIIQKYIRAREAGKHERIKYIEFKKSTVILQALVRGWLVRKRFLEQRAKIRLLHFTAAAYYHLNAVRIQRAYKLYLAVKNANKQVNSVICIQRWFRARLQEKRFIQKYHSIKKIEHEGQECLSQRNRAASVIQKAVRHFLLRKKQEKFTSGIIKIQALWRGYSWRKKNDCTKIKAIRLSLQVVNREIREENKLYKRTALALHYLLTYKHLSAILEALKHLEVVTRLSPLCCENMAQSGAISKIFVLIRSCNRSIPCMEVIRYAVQVLLNVSKYEKTTSAVYDVENCIDILLELLQIYREKPGNKVADKGGSIFTKTCCLLAILLKTTNRASDVRSRSKVVDRIYSLYKLTAHKHKMNTERILYKQKKNSSISIPFIPETPVRTRIVSRLKPDWVLRRDNMEEITNPLQAIQMVMDTLGIPY

SEQ ID NO: 32861 - protein, 70 aa, Homo sapiens
RLAAQRSLGSPEASLSLPDPAARAGAVGPGASTLCGVSWARAAGAESPRPRGGAARARPRPPAPPGGAPP

SEQ ID NO: 32862 - protein, 196 aa, Homo sapiens
KQPSDVSSECDREGRQLQPAERPPQLRPGAPTSLQTEPQGNPEGNHGGEGDSCPHGSPQGPLAPPASPGPFATRSPLFIFMRRSSLLSRSSSGYFSFDTDRSPAPMSCDKSTQTPSPPCQAFNHYLSAMASMRQAEPADMRPEIWIAQELRRIGDEFNAYYARRVFLNNYQAAEDHPRMVILRLLRYIVRLVWRMH

SEQ ID NO: 32863 - protein, 42 aa, Homo sapiens
VNSVKQFSHHPLHPGGISFGILIHTSMERLKTHLKTDISSSM

SEQ ID NO: 32864 - protein, 17 aa, Homo sapiens
LHRIIIFATNLFFNNKL

SEQ ID NO: 32865 - protein, 26 aa, Homo sapiens
MGKQSPTEDIVDLNSSELEGFLGDLF

SEQ ID NO: 32866 - protein, 38 aa, Homo sapiens
MLFHTVPGIYRAIPGCCQNITALPKNWVLNTEQICSLS

SEQ ID NO: 32867 - protein, 33 aa, Homo sapiens
RSYNESCPPDPAEQGGPKTCCTLDDVPLIRSHS

SEQ ID NO: 32868 - protein, 107 aa, Homo sapiens
VSEAAMAEVPELASEMMAYYSGNEDDLFFEADGPKQMKCSFQDLDLCPLDGGIQLRISDHHYSKGFRQAASVVVAMDKLRKMLVPCPQTFQENDLSTFFPFIFEEGS

SEQ ID NO: 32869 - protein, 70 aa, Homo sapiens
MSSSNLSADTSEHGKEPKRGTSCCSSFGKCYFCSFGVPSHQPEHCSSCSFESPDSNRLHVCSGQQRCWVS

SEQ ID NO: 32870 - protein, 72 aa, Homo sapiens
VARSRAGAGPGHGRLGAAVRVVAALLRAEGPGLPAAVAEGLCRCLQEEHLTVLSGATKARGGRCRGPAATTG

SEQ ID NO: 32871 - protein, 57 aa, Homo sapiens
VMWNILKPRTHLLCMTNMFCTRHEGTDSTVFLPHSHNISEWISRHIPFGFLHLCSYE

SEQ ID NO: 32872 - protein, 79 aa, Homo sapiens
MPTLSRPCGITPSSLTLSWRASACTAATWSASAAAPSRSKVTCAAWSWGTTASQRTTKRRQPPSTPCRACGGWTCQETP

SEQ ID NO: 32873 - protein, 11 aa, Homo sapiens
IRKQRRMKKHS

SEQ ID NO: 32874 - protein, 2598 aa, Homo sapiens
LIGREEFAMNLLRRSGKRRRSESGSDSFSGSGGDSSASPQFLSGSVLSPPPGLGRCLKAAAAGECKPTVPDYERDKLLLANWGLPKAVLEKYHSFGVKKMFEWQAECLLLGQVLEGKNLVYSAPTSAGKTLVAELLILKRVLEMRKKALFILPFVSVAKEKKYYLQSLFQEVGIKVDGYMGSTSPSRHFSSLDIAVCTIERANGLINRLIEENKMDLLGMVVVDELHMLGDSHRGYLLELLLTKICYITRKSASCQADLASSLSNAVQIVGMSATLPNLELVASWLNAELYHTDFRPVPLLESVKVGNSIYDSSMKLVREFEPMLQVKGDEDHVVSLCYETICDNHSVLLFCPSKKWCEKLADIIAREFYNLHHQAEGLVKPSECPPVILEQKELLEVMDQLRRLPSGLDSVLQKTVPWGVAFHHAGLTFEERDIIEGAFRQGLIRVLAATSTLSSGVNLPARRVIIRTPIFGGRPLDILTYKQMVGRAGRKGVDTVGESILICKNSEKSKGIALLQGSLKPVRSCLQRREGEEVTGSMIRAILEIIVGGVASTSQDMHTYAACTFLAASMKEGKQGIQRNQESVQLGAIEACVMWLLENEFIQSTEASDGTEGKVYHPTHLGSATLSSSLSPADTLDIFADLQRAMKGFVLENDLHILYLVTPMFEDWTTIDWYRFFCLWEKLPTSMKRVAELVGVEEGFLARCVKGKVVARTERQHRQMAIHKRFFTSLVLLDLISEVPLREINQKYGCNRGQIQSLQQSAAVYAGMITVFSNRLGWHNMELLLSQFQKRLTFGIQRELCDLVRVSLLNAQRARVLYASGFHTVADLARANIVEVEVILKNAVPFKSARKAVDEEEEAVEERRNMRTIWVTGRKGLTEREAAALIVEEARMILQQDLVEMGVQWNPCALLHSSTCSLTHSESEVKEHTFISQTKSSYKKLTSKNKSNTIFSDSYIKHSPNIVQDLNKSREHTSSFNCNFQNGNQEHQTCSIFRARKRASLDINKEKPGASQNEGKTSDKKVVQTFSQKTKKAPLNFNSEKMSRSFRSWKRRKHLKRSRDSSPLKDSGACRIHLQGQTLSNPSLCEDPFTLDEKKTEFRNSGPFAKNVSLSGKEKDNKTSFPLQIKQNCSWNITLTNDNFVEHIVTGSQSKNVTCQATSVVSEKGRGVAVEAEKINEVLIQNGSKNQNVYMKHHDIHPINQYLRKQSHEQTSTITKQKNIIERQMPCEAVSSYINRDSNVTINCERIKLNTEENKPSHFQALGDDISRTVIPSEVLPSAGAFSKSEGQHENFLNISRLQEKTGTYTTNKTKNNHVSDLGLVLCDFEDSFYLDTQSEKIIQQMATENAKLGAKDTNLAAGIMQKSLVQQNSMNSFQKECHIPFPAEQHPLGATKIDHLDLKTVGTMKQSSDSHGVDILTPESPIFHSPILLEENGLFLKKNEVSVTDSQLNSFLQGYQTQETVKPVILLIPQKRTPTGVEGECLPVPETSLNMSDSLLFDSFSDDYLVKEQLPDMQMKEPLPSEVTSNHFSDSLCLQEDLIKKSNVNENQDTHQQLTCSNDESIIFSEMDSVQMVEALDNVDIFPVQEKNHTVVSPRALELSDPVLDEHHQGDQDGGDQDERAEKSKLTGTRQNHSFIWSGASFDLSPGLQRILDKVSSPLENEKLKSMTINFSSLNRKNTELNEEQEVISNLETKQVQGISFSSNNEVKSKIEMLENNANHDETSSLLPRKESNIVDDNGLIPPTPIPTSASKLTFPGILETPVNPWKTNNVLQPGESYLFGSPSDIKNHDLSPGSRNGFKDNSPISDTSFSLQLSQDGLQLTPASSSSESLSIIDVASDQNLFQTFIKEWRCKKRFSISLACEKIRSLTSSKTATIGSRFKQASSPQEIPIRDDGFPIKGCDDTLVVGLAVCWGGRDAYYFSLQKEQKHSEISASLVPPSLDPSLTLKDRMWYLQSCLRKESDKECSVVIYDFIQSYKILLLSCGISLEQSYEDPKVACWLLDPDSQEPTLHSIVTSFLPHELPLLEGMETSQGIQSLGLNAGSEHSGRYRASVESILIFNSMNQLNSLLQKENLQDVFRKVEMPSQYCLALLELNGIGFSTAECESQKHIMQAKLDAIETQAYQLAGHSFSFTSSDDIAEVLFLELKLPPNREMKNQGSKKTLGSTRRGIDNGRKLRLGRQFSTSKDVLNKLKALHPLPGLILEWRRITNAITKVVFPLQREKCLNPFLGMERIYPVSQSHTATGRITFTEPNIQNVPRDFEIKMPTLVGESPPSQAVGKGLLPMGRGKYKKGFSVNPRCQAQMEERAADRGMPFSISMRHAFVPFPGGSILAADYSQLELRILAHLSHDRRLIQVLNTGADVFRSIAAEWKMIEPESVGDDLRQQAKQICYGIIYGMGAKSLGEQMGIKENDAACYIDSFKSRYTGINQFMTETVKNCKRDGFVQTILGRRRYLPGIKDNNPYRKAHAERQAINTIVQGSAADIVKIATVNIQKQLETFHSTFKSHGHREGMLQSDQTGLSRKRKLQGMFCPIRGGFFILQLHDELLYEVAEEDVVQVAQIVKNEMESAVKLSVKLKVKVKIGASWGELKDFDV

SEQ ID NO: 32875 - protein, 1212 aa, Homo sapiens
VRLGSAECEAWRAAARSDGPGAATPRGRPAARRAGDLPLHAPCALQLAGGTMKKFSRMPKSEGGSGGGAAGGGAGGAGAGAGCGSGGSSVGVRVFAVGRHQVTLEESLAEGGFSTVFLVRTHGGIRCALKRMYVNNMPDLNVCKREITIMKELSGHKNIVGYLDCAVNSISDNVWEVLILMEYCRAGQVVNQMNKKLQTGFTEPEVLQIFCDTCEAVARLHQCKTPIIHRDLKVENILLNDGGNYVLCDFGSATNKFLNPQKDGVNVVEEEIKKYTTLSYRAPEMINLYGGKPITTKADIWALGCLLYKLCFFTLPFGESQVAICDGNFTIPDNSRYSRNIHCLIRFMLEPDPEHRPDIFQVSYFAFKFAKKDCPVSNINNSSIPSALPEPMTASEAAARKSQIKARITDTIGPTETSIAPRQRPKANSATTATPSVLTIQSSATPVKVLAPGEFGNHRPKGALRPGNGPEILLGQGPPQQPPQQHRVLQQLQQGDWRLQQLHLQHRHPHQQQQQQQQQQQQQQQQQQQQQQQQQQQHHHHHHHHLLQDAYMQQYQHATQQQQMLQQQFLMHSVYQPQPSASQYPTMMPQYQQAFFQQQMLAQHQPSQQQASPEYLTSPQEFSPALVSYTSSLPAQVGTIMDSSYSANRSVADKEAIANFTNQKNISNPPDMSGWNPFGEDNFSKLTEEELLDREFDLLRSNRLEERASSDKNVDSLSAPHNHPPEDPFGSVPFISHSGSPEKKAEHSSINQENGTANPIKNGKTSPASKDQRTGKKTSVQGQVQKGNDESESDFESDPPSPKSSEEEEQDDEEVLQGEQGDFNDDDTEPENLGHRPLLMDSEDEEEEEKHSSDSDYEQAKAKYSDMSSVYRDRSGSGPTQDLNTILLTSAQLSSDVAVETPKQEFDVFGAVPFFAVRAQQPQQEKNEKNLPQHRFPAAGLEQEEFDVFTKAPFSKKVNVQECHAVGPEAHTIPGYPKSVDVFGSTPFQPFLTSTSKSESNEDLFGLVPFDEITGSQQQKVKQRSLQKLSSRQRRTKQDMSKSNGKRHHGTPTSTKKTLKPTYRTPERARRHKKVGRRDSQSSNEFLTISDSKENISVALTDGKDRGNVLQPEESLLDPFGAKPFHSPDLSWHPPHQGLSDIRADHNTVLPGRPRQNSLHGSFHSADVLKMDDFGAVPFTELVVQSITPHQSQQSQPVELDPFGAAPFPSKQ

SEQ ID NO: 32876 - protein, 150 aa, Homo sapiens
RPGLEKPTASSGKRARGLEVPEASGLGTHGRDTQGRPCAVSPGITGGDFMEPGGWASGWGERLQTGSSPWLCPPLSLLEWWGPCILSCPPPPFSPNCRRLLSPGDTVPASSGLGKHGLSSPALAPAPPASWTWAFLHPVEPHSQERCLEG

SEQ ID NO: 32877 - protein, 16 aa, Homo sapiens
KTNMNISSFSEEVKSR

SEQ ID NO: 32878 - protein, 33 aa, Homo sapiens
RLAWAATGGYDYSLAGSVRVVGWAECTLLGAAG

SEQ ID NO: 32879 - protein, 45 aa, Homo sapiens
LKTSAAAFGTSDLPSRKLGSQKIGNSYQHGKPIENSGDWLLVSST

SEQ ID NO: 32880 - protein, 20 aa, Homo sapiens
IFFLHHRINTFHLGFLNLNL

SEQ ID NO: 32881 - protein, 31 aa, Homo sapiens
ITEMYKCQILEVYSIPMLYEWAESSSLFFFW

SEQ ID NO: 32882 - protein, 120 aa, Homo sapiens
RRRRRCDAAGGKGPRAMAGRSRPFPPLPGNRGSPQTDLRETSPRFRAPPTEPRARGLTRGPTQGPPERQDSGPDLQRLQAQRPQAAWAERRFQALARSLNCRSSVDSHQSGGVLKEFYVD

SEQ ID NO: 32883 - protein, 213 aa, Homo sapiens
TRPSRPSATSTTWLCCAFRRMRTAAARSCRLTFSRCACQAAPRDPPRPRSARWPAGATSSRGRRNMPASCRRRRYRSSPWSAAQPRTCTDPPSSPACSAQGSSRAAPMRARVIPEARWCVRTKLQSAGSPCKASSAGDRAVVTATSQASTPMWPTTWPGSGSTPFPDCSGTHLSLLGDSAVREWLGHGRQDCVPFPQCGQLRARMAQELNKVL

SEQ ID NO: 32884 - protein, 259 aa, Homo sapiens
LLDSLKRDYAGKPQPPIKSERRNPPSYAMAGKKVLIVYAHQEPKSFNGSLKNVAVDELSRQGCTVTVSDLYAMNLEPRATDKDITGTLSNPEVFNYGVETHEAYKQRSLASDITDEQKKVREADLVIFQFPLYWFSVPAILKGWMDRVLCQGFAFDIPGFYDSGLLQGKLALLSVTTGGTAEMYTKTGVNGDSRYFLWPLQHGTLHFCGFKVLAPQISFAPEIASEEERKGMVAAWSQRLQTIWKEEPIPCTAHWHFGQ

SEQ ID NO: 32885 - protein, 26 aa, Homo sapiens
VSQSVEHDHPHALEFLRKDCANVNGE

SEQ ID NO: 32886 - protein, 9 aa, Homo sapiens
VLFFRHGSH

SEQ ID NO: 32887 - protein, 99 aa, Homo sapiens
VAEEAREESVAAAAAGPAAAAAAAAAATTSLLPRGAAARAPRAAHPAVLSAARPRWRALPPPVPAAPSVVLRLALGLPRQPQPQPQRHPQPQPQPQPQA

SEQ ID NO: 32888 - protein, 78 aa, Homo sapiens
TQAGGGQREAAARCGPRGSRRSPAPAAPWPEDPGTAYIAVTRMMRTLRCVTMTMMGCFPSLESVTWGKQGGPGKRMKN

SEQ ID NO: 32889 - protein, 61 aa, Homo sapiens
KSCFCREFSGMAWHILKHFSVSRSRKRRQLPRHTERLTDTRFGKLCRHLWSSYCPKLYSCA

SEQ ID NO: 32890 - protein, 67 aa, Homo sapiens
LSFVSRAVWARAGVPGTPPPPSFPQDSSLLALGPNGARLPGGRSAHRARLPLLLPDHLVSTRVCLHY

SEQ ID NO: 32891 - protein, 65 aa, Homo sapiens
LSFVSRAVWARAGVPGTPPPPSFPQDSSLLALGPNGARLPGGRSAHRARLPLLLPDHLVSTRNEI

SEQ ID NO: 32892 - protein, 58 aa, Homo sapiens
KVCAVDPRMKPAWKIPSLETEPDRGRCTGRTLSGFSNQAAILAPQVWDFWVFSWLASC

SEQ ID NO: 32893 - protein, 19 aa, Homo sapiens
IQPESVEVTPQWRDSSPCV

SEQ ID NO: 32894 - protein, 56 aa, Homo sapiens
RKMEETEILLVKQNKPLNRKNEEAVSTSGRNEPGRGTGTISEAMPLRLELALSPRR

SEQ ID NO: 32895 - protein, 14 aa, Homo sapiens
LYNALPNSRILKET

SEQ ID NO: 32896 - protein, 35 aa, Homo sapiens
MPIASGSCFLHPVLPYWTPCASPWLGKSEYTVSFN

SEQ ID NO: 32897 - protein, 43 aa, Homo sapiens
IWMNSSKNLKIQRFLERTSNSSISSVMLSMSPLLKSQAASRSQ

SEQ ID NO: 32898 - protein, 53 aa, Homo sapiens
ITFFQVKISSHTCMTQSDLEMWICPASKPNIALPLQVPVMRRRHTARNTPRRS

SEQ ID NO: 32899 - protein, 88 aa, Homo sapiens
LCLKLQRFCPDVSWNNAEDCLSGSRPIQFTSSRKYLTPALDPAALLRAEEGGNPMCLLPELPQPIFPQLGTWKKEPRTRLCFSFGPSW

SEQ ID NO: 32900 - protein, 28 aa, Homo sapiens
LATSILFGDHQRLNMAEGCHVCSKLRQH

SEQ ID NO: 32901 - protein, 455 aa, Homo sapiens
RILSPCLGEQFRRQMAPRAQIQGPLTFGDVAVAFTRIEWRHLDAAQRALYRDVMLENYGNLVSVGLLSSKPKLITQLEQGAEPWTEVREAPSGTHAVEDYWFETKMSALKQSTSEASVLGERTKSVMMEKGLDWEGRSSTEKNYKCKECGKVFKYNSSFISHQRNHTSEKPHKCKECGIAFMNSSSLLNHHKVHAGKQPYRCIECGKFLKKHSTFINHQRIHSREKPHKCIECGKTFRKNSILLSHQRIHTGQKPYKCNDCGKAFAQNAALTRHERIHSGEKPFKCNKCGRAFRDNSTVLEHQKIHTGEKPYQCNECGKAFRKSSTLISHQRMHTGEKPYHCSKCGKSFRYSSSFAGHQKTHSGNKPYQCRDCGKAFTKSSTLTGHQRIHTGEKPYHCKKCGKAFRHSSGLVEHQRLHTGEKPYKCNECGKAFPRSSALKQHKKIHNKERAMKCS

SEQ ID NO: 32902 - protein, 35 aa, Homo sapiens
LIKRDTDFWRKFESLRLRRRRMLINSQRRTKKYSD

SEQ ID NO: 32903 - protein, 61 aa, Homo sapiens
TPAPERDQGDSGPCRPPSPSAPHSAQVRGRALIFWRGPSWRRSQIRLRRRKRRRGRTSRWW

SEQ ID NO: 32904 - protein, 27 aa, Homo sapiens
ILTAHLRILTIRTHISLQEASWPSQTT

SEQ ID NO: 32905 - protein, 17 aa, Homo sapiens
ILSTVRHYFVERLASPS

SEQ ID NO: 32906 - protein, 15 aa, Homo sapiens
RAARPLLLSDPDTLR

SEQ ID NO: 32907 - protein, 408 aa, Homo sapiens
TLKTLRGAREAELGARWGPLAALERAEPQRRSWTTTQCISGGQLDWTGPLMPGCELPVGTCPDMCPAAERAQREREHRLHRLEVVPGCRQDPPRADPQRAVKEYSRPAAGKPRPPPSQLRPPSVLLATVRYLAGEVAESADIARAEVASFVADRLRAVLLDLALQGAGDAEAAVVLEAALATLLTVVARLGPDAARGPADPVLLQAQVQEGFGSLRRCYARGAGPHPRQPAFQGLFLLYNLGSVEALHEVLQLPAALRACPPLRKALAVDAAFREGNAARLFRLLQTLPYLPSCAVQCHVGHARREALARFARAFSTPKGQTLPLGFMVNLLALDGLREARDLCQAHGLPLDGEERVVFLRGRYVEEGLPPASTCKVLVESKLRGRTLEEVVMAEEEDEGTDRPGSPA

SEQ ID NO: 32908 - protein, 72 aa, Homo sapiens
VPERHPVCPARPMLAPVVWGPCVPEEQPWHLSGAGRGPWRPTVDGDHWQGPAPSIPSARDVCVASGPRVRGR

SEQ ID NO: 32909 - protein, 90 aa, Homo sapiens
MARGMMGFCSEGCPRGWCMHCSRTPCWIFLPFSSPFSLHISPIAPCPHGTCPPSAVSHQPWPSQCLLAPSSKEQRGGHRGWLCPTSTLCP

SEQ ID NO: 32910 - protein, 997 aa, Homo sapiens
VPSQPEQASGPQKQAFIWPEAPSRSARLPITYTDYWDSRLQTQESQMLGSMARKKPRNTSRLPLALNPLKSKDVLAVLAERNEAIVPVGAWVEPASPGSSEIPAYTSAYLIEEELKEQLRKKQEALKHFQKQVKYRVNQQIRLRKKQQLQKSYERAQKEGSIAMQSSATHLTSKRTSVFPNNLNVAIGSSRLPPSLMPGDGIEDEENQNELFQQQAQALSETMKQARHRLASFKTVIKKKGSVFPDDGRKSFLTREEVLSRKPASTGINTGIRGELPIKVHQGLLAAVPYQNYMENQELDYEEPDYEESSSLVTDEKGKEDLFGRGQQDQQAIHSEDKNKPFSRVQKVKFKNPLFVLMEEEEQKQLHFEGLQDILPEAQDYFLEAQGDLLETQGDLTGIQSVKPDTQAVEMKVQVTEPEGQAIEPEGQPIKTETQGIMLKAQSIELEEGSIVLKTQDFLPTNQALLTKNQDVLLKDHCVLPKDQSILLKYQDQDFLPRDQHVLHKDQDILPKYQDQNFLPKDQNFLSRDQHVLPKDQDILPKYQDQNFLPKDQNFLSRDQHVLPKDQNILPKYQGQDFLPKDQDFLSRDQHVLPKDWNILPKCQDQDFLPRDQGVLPKDQNILPICQDQDFLPRDQGYLPKDQNILPICQDRDFLPRDLHVLSNDQNILPKCQDQDFLPKYQKVHFKEPYSDMTDEKGREDFSLADYQCLPPKSQDQDDIKNQQPASFMREERVREELPLDYHQYVVPKIQDQDSPREQNKHIKLPSSFEKWEIARGNTPGVPLAYDRYQSGLSTEFQAPLAFQSDVDKEEDKKERQKQYLRHRRLFMDIEREQVKEQQRQKEQKKKIEKIKKKREQECYAAEQRILRMNFHEDPYSGEKLSEILAQLQLQEIKGTREKQQREKEYLRYVEALRAQIQEKMQLYNITLPPLCCCGPDFWDAHPDTCANNCIFYKNHRAYTRALHSFINSCDVPGGNSTLRVAIHNFASAHRRTLKNL

SEQ ID NO: 32911 - protein, 10 aa, Homo sapiens
KNMLYSCAPP

SEQ ID NO: 32912 - protein, 494 aa, Homo sapiens
KLLNLSHSKSLSALQESQVERAKRKQKQAEQALQELRDLLTEGKQRQEEAVRTREAELRQAMDIPEEYWPSPEEPLRELMENLQRQLNLMKWTLCHRQNLPDRDVVRWASGGLALQGIYKASHQRGLTEKREELLSVPKEFLLLGPQQGTQMKTKEFTSPQAEFMFTQMVEKLGFRLTTSAKDGNWGFSLEAGLDHSKHPESKETQQSSSENSYFCSTKFSYIPLASCHFPIDQLQLSKPAVQELKCIEELLSQTTNPDRFSLLRHRIINFFHRFGSHVNQGPLHLGGIYWWKAISEGYCTEQLAEVRQQSAEALDIFIRDSYSGFGVKVAAGVNVSDSHSKTATQTKTSQNLQTKVQLSVAQTGGPPEADGLVQWKAGLIASNQTWCVIDRGLQLVPVWDIILSSHRSNFKDPLQVANFLKDSYTALTSITAQIQNGEELLSAGKEARVFLEDVKSWEVSDPEEQLKKLINFMKMLSQKLKSYDTWINICLTD

SEQ ID NO: 32913 - protein, 31 aa, Homo sapiens
RSSRRSLSYVWEANAVRRSRSALRAKGPISY

SEQ ID NO: 32914 - protein, 77 aa, Homo sapiens; identical to SEQ ID NO: 31633

SEQ ID NO: 32915 - protein, 9 aa, Homo sapiens
KMVLMGQVP

SEQ ID NO: 32916 - protein, 184 aa, Homo sapiens
IMAVFNQKSVSDMIKEFRKNWRALCNSERTTLCGADSMLLALQLSMAENNKQVQLLARKIIFSYLNLLVNSKNDLAVAYILNIPDRGLGREAFTDLKHAAREKQMSIFLVATSFIRTIELGGKGYAPPPSDPLRTHVKGLSNFINFIDKLDEILGEIPNPRGCKSICWKINNWNEFWKCSSGQK

SEQ ID NO: 32917 - protein, 657 aa, Homo sapiens
IMAVFNQKSVSDMIKEFRKNWRALCNSERTTLCGADSMLLALQLSMAENNKQHSGEFTVSLSDVLLTWKYLLHEKLNLPVENMDVTDHYEDVRKIYDDFLKNSNMLDLIDVYQKCRALTSNCENYNTVSPGSTIQPPSERGSLLLSRPDLLAPGEDPPVSASLTLERQKGESLLAWSWSLNFRLPGIPITVQKKRRDLKKLAAVMRQSQLLDFLSGKQYAVGDETDLSIPTSPTSKYNRDNEKVQLLARKIIFSYLNLLVNSKNDLAVAYILNIPDRGLGREAFTDLKHAAREKQMSIFLVATSFIRTIELGGKGYAPPPSDPLRTHVKGLSNFINFIDKLDEILGEIPNPSIAGGQILSVIKMQLIKGQNSRDPFCKAIEEVAQDLDLRIKNIINSQEGVVALSTTDISPARPKSHAINHGTAYCGRDTVKALLVLLDEEAANAPTKNKAELLYDEENTIHHHGTSILTLFRSPTQVNNSIKPLRERICVSMQEKKIKMKQTLIRSQFACTYKDDYMISKDNWNNVNLASKPLCVLYMENDLSEGVNPSVGRSTIGTSFGNVHLDRSKNEKVSRKSTSQTGNKSSKRKQVDLDGENILCDNRNEPPQHKNAKIPKKSNDSQNRLYGKLAKVAKSNKCTAKDKLISGQAKLTQFFRL

SEQ ID NO: 32918 - protein, 45 aa, Homo sapiens
KAWLMVDSSERERSEGRWMQKLEIVCFNIEKLWKRTSRHPTSWIT

SEQ ID NO: 32919 - protein, 100 aa, Homo sapiens
IGARHSLLVPGWPLPPPCNSWLRWAQPRASQSHQRGLRRTTSIWLEWRTPVHLVLASCALPSRWRALHSQAYQQGSNWRVLNMPRTQIPALLLLVLHGHL

SEQ ID NO: 32920 - protein, 926 aa, Homo sapiens
VEVPAEAGSLLRKAGMEVNCLTLKDLISPRQPRLDFAVEDGENAQKENIFVDRSRMAPKTPIKNEPIDLSKQKKFTPERNPITPVKFVDRQQAEPWTPTANLKMLISAASPDIRDREKKKGLFRPIENKDDAFTDSLQLDVVGDSAVDEFEKQRPSRKQKSLGLLCQKFLARYPSYPLSTEKTTISLDEVAVSLGVERRRIYDIVNVLESLHLVSRVAKNQYGWHGRHSLPKTLRNLQRLGEEQKYEEQMAYLQQKELDLIDYKFGERKKDGDPDSQEQQLLDFSEPDCPSSSANSRKDKSLRIMSQKFVMLFLVSKTKIVTLDVAAKILIEESQDAPDHSKFKTKVRRLYDIANVLTSLALIKKVHVTEERGRKPAFKWIGPVDFSSSDEELVDVSASVLPELKRETYGQIQVCAKQKLARHGSFNTVQASERIQRKVNSEPSSPYREEQGSGGYSLEIGSLAAVYRQKIEDNSQGKAFASKRVVPPSSSLDPVAPFPVLSVDPEYCVNPLAHPVFSVAQTDLQAFSMQNGLNGQVDVSLASAASAVESLKPALLAGQPLVYVPSASLFMLYGSLQEGPASGSGSERDDRSSEAPATVELSSAPSAQKRLCEERKPQEEDEPATKRQSREYEDGPLSLVMPKKPSDSTDLASPKTMGNRASIPLKDIHVNGQLPAAEEISGKATANSLVSSEWGNPSRNTDVEKPSKENESTKEPSLLQYLCVQSPAGLNGFNVLLSGSQTPPTVGPSSGQLPSFSVPCMVLPSPPLGPFPVLYSPAMPGPVSSTLGALPNTGPVNFSLPGLGSIAQLLVGPTAVVNPKSSTLPSADPQLQSQPSLNLSPVMSRSHSVVQQPESPVYVGHPVSVVKLHQSPVPVTPKSIQRTHRETFFKTPGSLGDPVLKRRERNQSRNTSSAQRRLEIPSGGAD

SEQ ID NO: 32921 - protein, 434 aa, Homo sapiens
ILSRMAEAVLIDLFGLKLNSQKNCHQTLLKTLNAVQYHHAAKAKFLCIMCCSNISYERDGEQDNCEIETSNGLSALLEEFEIVSCPSMAATLYTIKQKIDEKNLSSIKVIVPRHRKTLMKAFIDQLFTDVYNFEFEDLQVTFRGGLFKQSIEINVITAQELRGIQNEIETFLRSLPALRGKLTIITSSLIPDIFIHGFTTRTGGISYIPTLSSFNLFSSSKRRDPKVVVQENLRRLANAAGFNVEKFYRIKTHHSNDIWIMGRKEPDSYDGITTNQRGVTIAALGADCIPIVFADPVKKACGVAHAGWKGTLLGVAMATVNAMIAEYGCSLEDIVVVLGPSVGPCCFTLPRESAEAFHNLHPACVQLFDSPNPCIDIRKATRILLEQGGILPQNIQDQNQDLNLCTSCHPDKFFSHVRDGLNFGTQIGFISIKE

SEQ ID NO: 32922 - protein, 37 aa, Homo sapiens
IYQLSFGTYILYSWFENSIYKEQHSFGIHKLPIIKNK

SEQ ID NO: 32923 - protein, 345 aa, Homo sapiens
IANIGQQANIPTAVQQPSTQVPPSVIQQGAPPSSQVVPPAQTGIIHQGVQTSAPSLPQQLVIASQSSLLTVPPQPQGVEPVAQGIVSQQLPAVSSLPSASSISVTSQVSSTGPSGMPSAPTNLVPPQNIAQTPATQNGNLVQSVSQPPLIATNTNLPLAQQIPLSSTQFSAQSLAQAIGSQIEDARRAAEPSLVGLPQTISGDSGGMSAVSDGSSSSLAASASLFPLKVLPLTTPLVDGEDESSSGASVVAIDNKIEQAMDLVKSHLMYAVREEVEVLKEQIKELIEKNSQLEQENNLLKTLASPEQLAQFQAQLQTGSPPATTQPQGTTQPPAQPASQGSGPTA

SEQ ID NO: 32924 - protein, 22 aa, Homo sapiens
LTHQMKSLLKMNRLQFIYHGYL

SEQ ID NO: 32925 - protein, 357 aa, Homo sapiens
LRIMSLRGSLSRLLQTRVHSILKKSVHSVAVIGAPFSQGQKRKGVEHGPAAIREAGLMKRLSSLGCHLKDFGDLSFTPVPKDDLYNNLIVNPRSVGLANQELAEVVSRAVSDGYSCVTLGGDHSLAIGTISGHARHCPDLCVVWVDAHADINTPLTTSSGNLHGQPVSFLLRELQDKVPQLPGFSWIKPCISSASIVYIGLRDVDPPEHFILKNYDIQYFSMRDIDRLGIQKVMERTFDLLIGKRQRPIHLSFDIDAFDPTLAPATGTPVVGGLTYREGMYIAEEIHNTGLLSALDLVEVNPQLATSEEEAKTTANLAVDVIASSFGQTREGGHIVYDQLPTPSSPDESENQARVRI

SEQ ID NO: 32926 - protein, 92 aa, Homo sapiens
LASQAWGDKLPELQWAAAGDSCLASWAPCGCSARATERSSPRRQRHRGASARLVVTWMIVPVMLKPLIDLITTGFSQDYKNFLKVTTLGITR

SEQ ID NO: 32927 - protein, 27 aa, Homo sapiens
KESTPTALTWAAFLRKCSHSSSCWPFF

SEQ ID NO: 32928 - protein, 1116 aa, Homo sapiens
KSVELREEQLGVLGVCFDLCTSMAESSSESDHFRCRDRLSPWAARSTHRGTRSLPTVEVTEKVNTITSTLQDTSRNLRQVDQMLGRYREYSNGQAGAIEHLKESLEQSIDQLRSQRLLRNSGGRSISVTSLSASDLDGGTGSELHHFPPTSPLKDYGDPQGIKRMRSRTGVRFVQETDDMTQLHGFHQSLRDLSSEQIRLGDDFNRELSRRSRSDAETKRALEELTEKLNEAQKQEVVSDRVERRLQELEREMRTERELVERRQDQLGLMSLQLQEALKKQEAKADEHEGAIKNKLRQTETEKNQLEQELELSRRLLNQSEGSRETLLHQVEELRTQLTKAEGDRKGLQHQVSQISKQQSNYQDEQGEDWRFRRGVEREKQDLEKQMSDLRVQLNFSAMASELEEVKRCMERKDKEKAHLASQVENLTRELENGEKQQLQMLDRLKEIQNHFDTCEAERKHADLQISELTRHAEDATKQAERYLSELQQSEALKEEAEKRREDLKLKAQESIRQWKLKHKKLERALEKQSETVDELTGKNNQILKEKDELKTQLYAALQQIENLRKELNDVLTKRALQEEELHSKEEKLRDIKSHQADLELEVKNSLDTIHRLESELKKQSKIQSQMKVEKAHLEEEIAELKKSQAQDKAKLLEMQESIKDLSAIRADLANKLAEEERAKKAVLKDLSDLTAQAKSRDEETATIITQLKLERDVHQRELKDLTSSLQSVKTKHEQNIQELMKHFKKEKSEAENHIRTLKAESLEEKNMAKIHRGQLEKLKSQCDRLTEELTQNENENKKLKLKYQCLKDQLEEREKHISIEEEHLRRMEEARLQLKDQLLCLETEQESILGVIGKEIDAACKTFSKDSVEKLKVFSSGPDIHYDPHRWLAESKTKLQWLCEELKERENREKNLRHQLMLCRQQLRNLTENKESELQCLFQQIERQEQLLDEIHREKRDLLEETQRKDEEMGSLQDRVIALETSTQVALDHLESVPEKLSLLEDFKDFRDSCSSSERTDGRYSKYRVRRNSLQHHQDDTKYRTKSFKGDRTFLEGSHTRGLDHSSSWQDHSRFLSSPRFSYVNSFTKRTVAPDSASNKEDATMNGTSSQPKKEEYGS

SEQ ID NO: 32929 - protein, 47 aa, Homo sapiens
LKEKEIFSKLGSGQHRRQNVFSKSWSRMQTTHTGLKYRTFLRKPSPS

SEQ ID NO: 32930 - protein, 25 aa, Homo sapiens
VATSAVSSTTWPPFESLDSSAEQIL

SEQ ID NO: 32931 - protein, 149 aa, Homo sapiens
LSPGREEKGRLPPRLSAGNPKSAKPLSMEPSSPLGEWTDPALPLENQVWYHGAISRTDAENLLRLCKEASYLVRNSETSKNDFSLSLKSSQGFMHMKLSRTKEHKYVLGQNSPPFSSVPEIVHHYASRKLPIKGAEHMSLLYPVAIRTL

SEQ ID NO: 32932 - protein, 172 aa, Homo sapiens
KTLLSTRQKMTDCEFGYIYRLAQDYLQCVLQIPQPGSGPSKTSRVLQNVAFSVQKEVEKNLKSCLDNVNVVSVDTARTLFNQVMEKEFEDGIINWGRIVTIFAFEGILIKKLLRQQIAPDVDTYKEISYFVAEFIMNNTGEWIRQNGGWGKWHNHTPMLVESVAHKKRKMAL

SEQ ID NO: 32933 - protein, 55 aa, Homo sapiens
VGGTSRDWSEEGICLTVDPWGSTLSSEMLQLGPPLSERSFAALKLTGEGKASPGV

SEQ ID NO: 32934 - protein, 6 aa, Homo sapiens
RVSHVI

SEQ ID NO: 32935 - protein, 150 aa, Homo sapiens
MASLLQLMAAPTSSCTSLMWKGSMSQWKATRSPIKCAPSHPRMRSCRPWRSSSLTWHQAPSMRPGLDMSSAPRRWWKHPLSCACGRLCREEAADTGDDILPHETGLQPGMVPLKYLLEEGVWGAGVGCGVFPAISTAYDHCNNLSPSEEH

SEQ ID NO: 32936 - protein, 29 aa, Homo sapiens
MGWAVEQELASLEKGDHEPHFPFPKKRKA

SEQ ID NO: 32937 - protein, 39 aa, Homo sapiens
RLTQTMPAAPLPHHPQPRSMGQSLLRCFEDSTATLTSRS

SEQ ID NO: 32938 - protein, 37 aa, Homo sapiens
RSLSSFPLISPSWDRKCLHLHPQGPGLQGPLAPQQAS

SEQ ID NO: 32939 - protein, 234 aa, Homo sapiens
IPVYRFVQRPGDLVWINAGTVHWVQATGWCNNIAWNVGPLTAYQYQLALERYEWNEVKNVKSIVPMIHVSWNVARTVKISDPDLFKMIKFCLLQSMKHCQVQRESLVRAGKKIAYQGRVKDEPAYYCNECDVEVFNILFVTSENGSRNTYLVHCEGCARRRSAGLQGVVVLEQYRTEELAQAYDAFTLVRARRARGQRRRALGQAAGTGFGSPAAPFPEPPPAFSPQAPASTSR

SEQ ID NO: 32940 - protein, 285 aa, Homo sapiens
RMAELVPFAVPIESDKTLLVWELSSGPTAEALHHSLFTAFSQFGLLYSVRVFPNAAVAHPGFYAVIKFYSARAAHRAQKACDRKQLFQKSPVKVRLGTRHKAVQHQALALNSSKCQELANYYFGFNGCSKRIIKLQELSDLEERENEDSMVPLPKQSLKFFCALEVVLPSCDCRSPGIGLVEEPMDKVEEGPLSFLMKRKTAQKLAIQKALSDAFQKLLIVVLESGKIAVEYRPSEDIVGVRCEEELHGLIQVPCSPWKQYGQEEEGYLSDFSLEEEEFRLPELD

SEQ ID NO: 32941 - protein, 136 aa, Homo sapiens
LVPFAVPIESDKTLLVWELSSGPTAEALHHSLFTAFSQFGLLYSVRVFPNAAVAHPGFYAVIKFYSARAAHRAQKACDRKQLFQKSPVKVRLGTRHKAVQHQALALNSSKCQELANYYFGFNGCSKRIIKDHYHSL

SEQ ID NO: 32942 - protein, 16 aa, Homo sapiens
LSCDSGSFSSFLHSCC

SEQ ID NO: 32943 - protein, 496 aa, Homo sapiens
LLLPAMASRCWRWWGWSAWPRTRLPPAGSTPSFCHHFSTQEKTPQICVVGSGPAGFYTAQHLLKHPQAHVDIYEKQPVPFGLVRFGVAPDHPEVKNVINTFTQTAHSGRCAFWGNVEVGRDVTVPELQEAYHAVVLSYGAEDHRALEIPGEELPGVCSARAFVGWYNGLPENQELEPDLSCDTAVILGQGNVALDVARILLTPPEHLERTDITKAALGVLRQSRVKTVWLVGRRGPLQVAFTIKELREMIQLPGARPILDPVDFLGLQDKIKEVPRPRKRLTELLLRTATEKPGPAEAARQASASRAWGLRFFRSPQQVLPSPDGRRAAGVRLAVTRLEGVDEATRAVPTGDMEDLPCGLVLSSIGYKSRPVDPSVPFDSKLGVIPNVEGRVMDVPGLYCSGWVKRGPTGVIATTMTDSFLTGQMLLQDLKAGLLPSGPRPGYAAIQALLSSRGVRPVSFSDWEKLDAEEVARGQGTGKPREKLVDPQEMLRLLGH

SEQ ID NO: 32944 - protein, 26 aa, Homo sapiens
ITEAGMPLWNCTAPACGLCLISPGCL

SEQ ID NO: 32945 - protein, 100 aa, Homo sapiens
LASPPPPVPTLFPALKPCHRRAGLPGCFRQGSLGPWGVTPKEKAASLRTRLPGALSRAGWAGGCPGQQGPGGDATRCRLRPPHHGPLADLALLPLVPDGG

SEQ ID NO: 32946 - protein, 11 aa, Homo sapiens
LRPSSLSVAFS

SEQ ID NO: 32947 - protein, 648 aa, Homo sapiens
LCPLLAEAQPLWPCDLQVLRDPQLRRQVPRKPRNGRPEVWSVSSQGSKWIPGAERKLLVYSYFEKETLTFRDVAIEFSLEEWECLNPAQQNLYMNVMLENYKNLVFLAGIAVSKQDPITSLEQEKEPWNMKICEMVDESPAMCSSFTRDLWPEQDIKDSFQQVILRRHGKCEHENLQLRKGSANVVECKVYKKGYNELNQCLTTTQSKIFPCDKYIKVFHKIFNSNRHKTRHTGEKPFKCKKCDESFCMLLHLHQHKRIHIRENSYQCEECDKVFKRFSTLTRHKRVHTGEKPFKCEECGKAFKHSSTLTTHKMIHTGEKPYRCEECGKAFYHSSHLTTHKVIHTGEKPFKCEECGKAFNHPSALTTHKFIHVKEKPYKCEECDKAFNRFSYLTKHKIIHSGEKSYKCEQCGKGFNWSSTLTKHKRIHTGEKPYKCEECGKAFNVSSHLTTHKMIHTGEKPYKCEECGKAFNHSSKLTIHKIIHTGEKPYKCEECGKAFNQSSNLTKHKIIHTGEKLYKCEECGKAFNRSSNLTTHKRIHTGEKPYKCEECGKAFNRSSNLTKHNIIHTGEKSYKCEECGKAFNQSSTLTKHRKIQQGMVAHACNPNTLRGLGEQIARSGVQDQPGQHGKTPSLLKIQKFAGCGGRRL

SEQ ID NO: 32948 - protein, 378 aa, Homo sapiens
RHWHSYSEGLGHPRVSQVTFPPPQEAMTEAGKLPLPLPPRLDWFVHTQMGQLAQDGVPEWFHGAISREDAENLLESQPLGSFLIRVSHSHVGYTLSYKAQSSCCHFMVKLLDDGTFMIPGEKVAHTSLDALVTFHQQKPIEPRRELLTQPCRQKDPANVDYEDLFLYSNAVAEEAACPVSAPEEASPKPVLCHQSKERKPSAEMNRITTKEATSSCPPKSPLGETRQKLWRSLKMLPERGQRVRQQLKSHLATVNLSSLLDVRRSTVISGPGTGKGSQDHSGDPTSGDRGYTDPCVATSLKSPSQPQAPKDRKVPTRKAERSVSCIEVTPGDRSWHQMVVRALSSQESKPEHQGLAEPENDQLPEEYQQPPPFAPGYC

SEQ ID NO: 32949 - protein, 1122 aa, Homo sapiens; identical to SEQ ID NO: 24310

SEQ ID NO: 32950 - protein, 90 aa, Homo sapiens
LHPLQDPHSSPLWSLDHRWRWPELTCWLWGHSSCWPRMRRGTRSFTCLRLGGCAGRHMLRLRCSRCTGVLTFVSIRARPLSWWRLLPTSP

SEQ ID NO: 32951 - protein, 68 aa, Homo sapiens
KCESSVLGYSATCLPDMGRWRVSSVESWPFASTGGKLAIATAGTGTQAAPRPFLIRPPDSWALALALM

SEQ ID NO: 32952 - protein, 253 aa, Homo sapiens
IGCGWLPLRSDWPLVSKMLSKGLKRKREEEEEKEPLAVDSWWLDPGHTAVAQAPPAVASSSLFDLSVLKLHHSLQQSEPDLRHLVLVVNTLRRIQASMAPAAALPPVPSPPAAPSVADNLLASSDAALSASMASLLEDLSHIEGLSQAPQPLADEGPPGRSIGGAAPSLGALDLLGPATGCLLDDGLEGLFEDIDTSMYDNELWAPASEGLKPGPEDGPGKEEAPELDEAELDYLMDVLVGTQALERPPGPGR

SEQ ID NO: 32953 - protein, 63 aa, Homo sapiens
ITHFGSKFKKGRLVRTHPERDLTFLRGSLSNLMDFVKKTGICASKWEWGTTHNFLYKHVPRSS

SEQ ID NO: 32954 - protein, 113 aa, Homo sapiens
LPPARSELCPDPTPSPAACQHGSPAPTLAGGVQGHHRTAGSPLCLPTPGAAPGSAGSCSHRRVRWPRGHLFQRGAGGPSRGQPGGQPCGGRVCPRPEAQRDPSQSPRATAGED

SEQ ID NO: 32955 - protein, 36 aa, Homo sapiens
IFARLQDFRKGVKEKIATLSQTCRPDRLIKPQKVTC

SEQ ID NO: 32956 - protein, 102 aa, Homo sapiens
RWSRARGSFSSWPRTWMLCVRARSFRPCSSVTTCNIRWFQFLGGKNLKLHFLSIKNRSNYSLNKMMTLKFPPMKTSSGMKRRMKSIQEMTVMGQSLLRSAHG

SEQ ID NO: 32957 - protein, 61 aa, Homo sapiens
LAPLPSRPADAGGPASAVGSCVAGPGAAGGAAAASEALGLGPVPYRLERVHPAAHPQPAHG

SEQ ID NO: 32958 - protein, 39 aa, Homo sapiens
MPRARWMPRPQKPRARRTEEWWTRLEHWPRRSSLPARRV

SEQ ID NO: 32959 - protein, 67 aa, Homo sapiens
VMGLGRCIWEGPGGDSNPALTYPKSRLTAFPIPTFPVTAARTDRHCCRELATVFHAVAGGSRLHAPF

SEQ ID NO: 32960 - protein, 39 aa, Homo sapiens
TLPSSGSLALASAKWQVPSSTSTSTQEPSCWPASALTAT

SEQ ID NO: 32961 - protein, 300 aa, Homo sapiens
VLVTPEKPLRRGLSHRSDPNAVAPAPQGVRLSLGPLSPEKLEEILDEANRLAAQLEQCALQDRESAGEGLGPRRVKPSPRRETFVLKDSPVRDLLPTVNSLTRSTPSPSSLTPRLRSNDRKGSVRALRATSGKRPSNMKRESPTCNLFPASKSPASSPLTRSTPPVRGRAGPSGRAAASPPTPIRSVLAPQPSTSNSQRLPRPQGAAAKSSSQLPIPSAIPRPASRMPLTSRSVPPGRGALPPDSLSTRKGLPRPSTAGHRVRESGHKVPVSQRLNLPVMGATRSNLQPPRKVAVPGPTR

SEQ ID NO: 32962 - protein, 40 aa, Homo sapiens
LWSANKALGWRGRLAAFLVVGPSEQSSWFWRWLRRLDCGV

SEQ ID NO: 32963 - protein, 32 aa, Homo sapiens
LHLDSISGNNRAPPRSVNYRKCQVGNLPMVKW

SEQ ID NO: 32964 - protein, 1910 aa, Homo sapiens
LLLHYSPQACKNNICLDLSPSHGLDGRLTGHRVETWDVKDVVNCVGGMGALLPLLERVAAQPKEAEAGPAETHDLVGPELTSGHNTQGLVLPLGKSSEERMERNAVAAFLLMLRNFLQGHMVNQESLVQCQGPAIIGALLRKVPSWAMDMNVLMSAQLLMEQVAAEGSGPLLYLLYQHLLFNFHLWTLSDFAVRLGHIQYMSSIVREHRQKLRKKYGVQFILDALRTHYSPQRERPLAADDLRTVQTSLLGLAREFLVRSLSADDVQVTQTMLSFLAATGDDGQAVGALDLLLALLHGSLVQESLAVFLLEPGNLEVLLALLVRPGSLPLLPDRVCKILRRLQQNERLPERSRQRLRLRECGLQGLVACLPEGTVSPQLCQGLYKLFLGADCLNLSDLLAVVQLSLQADLSVRLDICRQLFHLIYGQPDVVRLLARQAGWQDVLTRLYVLEAATAGSPPPSSPESPTSPKPAPPKPPTESPAEPSDVFLPSEAPCPDPDGFYHALSPFCTPFDLGLERSSVGSGNTAGGGGSSGTLTPASQPGTPSPLDGPRPFPAAPGRHSSSLSNVLEDGSLPEPTISGDDTSNTSNPQQTSEEELCNLLTNVLFSVTWRGVEGSDEAAWRERGQVFSVLTQLGASATLVRPPDCIKRSLLEMMLESALTDIKEAPVGVLASLTQQALWLLRLLQDFLCAEGHGNQELWSEKLFEGVCSLLDRLGAWPHLANGTADLREMAQIGLRLVLGYILLEDPQLHAQAYVRLHMLLQTAVPARREEACYVLSKLEAALGRVLNTSSLESATDEAGSPLAAAAAAAAAERCSWLVPLVRTLLDRAYEPLGLQWGLPSLPPTNGSPTFFEDFQAFCATPEWRHFIDKQVQPTMSQFEMDTYAKSHDLMSGFWNACYDMLMSSGQRRQWERAQSRRAFQELVLEPAQRRARLEGLRYTAVLKQQATQHSMALLHWGALWRQLASPCGAWALRDTPIPRWKLSSAETYSRMRLKLVPNHHFDPHLEASALRDNLGEVPLTPTEEASLPLAVTKEAKVSTPPELLQEDQLGEDELAELETPMEAAELDEQREKLVLSAECQLVTVVAVVPGLLEVTTQNVYFYDGSTERVETEEGIGYDFRRPLAQLREVHLRRFNLRRSALELFFIDQANYFLNFPCKVGTTPVSSPSQTPRPQPGPIPPHTQVRNQVYSWLLRLRPPSQGYLSSRSPQEMLRASGLTQKWVQREISNFEYLMQLNTIAGRTYNDLSQYPVFPWVLQDYVSPTLDLSNPAVFRDLSKPIGVVNPKHAQLVREKYESFEDPAGTIDKFHYGTHYSNAAGVMHYLIRVEPFTSLHVQLQSGRFDCSDRQFHSVAAAWQARLESPADVKELIPEFFYFPDFLENQNGFDLGCLQLTNEKVGDVVLPPWASSPEDFIQQHRQALESEYVSAHLHEWIDLIFGYKQRGPAAEEALNVFYYCTYEGAVDLDHVTDERERKALEGIISNFGQTPCQLLKEPHPTRLSAEEAAHRLARLDTNSPSIFQHLDELKAFFAEVVSDGVPLVLALVPHRQPHSFITQGSPDLLVTVSASGLLGTHSWLPYDRNISNYFSFSKDPTMGSHKTQRLLSGPWVPGSGVSGQALAVAPDGKLLFSGGHWDGSLRVTALPRGKLLSQLSCHLDVVTCLALDTCGIYLISGSRDTTCMVWRLLHQGGLSVGLAPKPVQVLYGHGAAVSCVAISTELDMAVSGSEDGTVIIHTVRRGQFVAALRPLGATFPGPIFHLALGSEGQIVVQSSAWERPGAQVTYSLHLYSVNGKLRASLPLAEQPTALTVTEDFVLLGTAQCALHILQLNTLLPAAPPLPMKVAIRSVAVTKERSHVLVGLEDGKLIVVVAGQPSEVRSSQFARKLWRSSRRISQVSSGETEYNPTEAR

SEQ ID NO: 32965 - protein, 24 aa, Homo sapiens
IASQTFLRAAFRKASCFWLGPDLP

SEQ ID NO: 32966 - protein, 32 aa, Homo sapiens; identical to SEQ ID NO: 31235

SEQ ID NO: 32967 - protein, 6 aa, Homo sapiens
KIAPES

SEQ ID NO: 32968 - protein, 39 aa, Homo sapiens
MRPWSFFVLRCRYGNIAVVSRAMSIVSQRPKLWIGCMSC

SEQ ID NO: 32969 - protein, 22 aa, Homo sapiens
ILLRTGDHGQTSTGCQVPGLHP

SEQ ID NO: 32970 - protein, 749 aa, Homo sapiens
RHSHTGVKSTPGQSAAILMKLRSSHNASKTLNANNMETLIECQSEGDIKEHPLLASCESEDSICQLIEVKKRKKVLSWPFLMRRLSPASDFSGALETDLKASLFDQPLSIICGDSDTLPRPIQDILTILCLKGPSTEGIFRRAANEKARKELKEELNSGDAVDLERLPVHLLAVVFKDFLRSIPRKLLSSDLFEEWMGALEMQDEEDRIEALKQVADKLPRPNLLLLKHLVYVLHLISKNSEVNRMDSSNLAICIGPNMLTLENDQSLSFEAQKDLNNKVKTLVEFLIDNCFEIFGENIPVHSSITSDDSLEHTDSSDVSTLQNDSAYDSNDPDVESNSSSGISSPSRQPQVPMATAAGLDSAGPQDAREVSPEPIVSTVARLKSSLAQPDRRYSEPSMPSSQECLESRVTNQTLTKSEGDFPVPRVGSRLESEEAEDPFPEEVFPAVQGKTKRPVDLKIKNLAPGSVLPRALVLKAFSSSSLDASSDSSPVASPSSPKRNFFSRHQSFTTKTEKGKPSREIKKHSMSFTFAPHKKVLTKNLSAGSGKSQDFTRDHVPRGVRKESQLAGRIVQENGCETHNQTARGFCLRPHALSVDDVFQGADWERPGSPPSYEEAMQGPAARLVASESQTVGSMTVGSMRARMLEAHCLLPPLPPAHHVEDSRHRGSKEPLPGHGLSPLPERWKQSRTVHASGDSLGHVSGPGRPELLPLRTVSESVQRNKRDCLVRRCSQPVFEADQFQYAKESYI

SEQ ID NO: 32971 - protein, 24 aa, Homo sapiens
IAQIMFETFNIPAMYMAIWVMLSV

SEQ ID NO: 32972 - protein, 148 aa, Homo sapiens
KGVNTLWGSFEISNVRLARVMLTQFAEGRLEDQLDKYDHWADRFEDLPLYFMTFHGQQSIRTVIDTMQHAVYVYDICHVIIDNLQFMMGHEQLSTDRIAAQDYIIGVFRKFATDNNCHVTLVIHPRKEDDDKELQTASIFGSAKVSGL

SEQ ID NO: 32973 - protein, 119 aa, Homo sapiens
IVPSGMKMKVFRMEGSQLNFQEKYVNRSQHVVSQDLASLLTLMRKLKIPRPIQKSLKEKFQEILRYISRMSKKTVPQMTQKTVLLREQLMFIPQNMLDVMAEMQLIPFLGILKKFPALN

SEQ ID NO: 32974 - protein, 22 aa, Homo sapiens
TIMASPPCTGPAERAALLWLRC

SEQ ID NO: 32975 - protein, 72 aa, Homo sapiens
MHCSRTPCWIFLPFSSPFSLHISPIAPCPHGTCPPSAVSHQPWPSQCLLAPSSKEQRGGHRGWLCPTSTLCP

SEQ ID NO: 32976 - protein, 8 aa, Homo sapiens
RAKGPISY

SEQ ID NO: 32977 - protein, 300 aa, Homo sapiens
KEAPGTIEFVADPAALATILSGEGVKSCHLGRQPSLAKRVLVRGSQGGTTQRVQGVRASAYLAPRTPTHRLDPARASCFSRLEGPGPRGRTLCPQRLQALISPSGPSFHPSTRPSFQELRRETAGSSRTSVSQASGLLLETPVQPAFSLPKGEREVVTHSDEGGVASLGLAQRVPLRENREMSHTRDSHDSHLMPSPAPVAQPLPGHVVPCPSPFGRAQRVPSPGPPTLTSYSVLRRLTVQPKTRFTPMPSTPRVQQAQWLRGVSPQSCSEDPALPWVSIRSFPLLRSLALCCQPGGPGV

SEQ ID NO: 32978 - protein, 36 aa, Homo sapiens
KFEFRGGSGCEGSCFGVGGGRPDRVFFTFCLVEVSR

SEQ ID NO: 32979 - protein, 77 aa, Homo sapiens
RQGCADMSVQSPASWVPGGRCGENSARYQDRWGTAEAVWGGAFVHSFFLRNRQRLINCLMLCHQIKTARMSHPNPSL

SEQ ID NO: 32980 - protein, 48 aa, Homo sapiens
RRASRGSLWRLTQTMPAAPLPHHPQPRSMGQSLLRCFEDSTATLTSRS

SEQ ID NO: 32981 - protein, 85 aa, Homo sapiens
RNLVARWRSPPETSAPAAAPAAPWAAPRMRSISCPSRPSTRCAAPAPTPPSTPSSEFPLTVFTLRFGESCCTWLLTPIQRSRTWP

SEQ ID NO: 32982 - protein, 40 aa, Homo sapiens
RLLRGGSCPSGPQPRRGCPRRPRLSSCSAPTETHSLSWDN

SEQ ID NO: 32983 - protein, 99 aa, Homo sapiens
TRRTSRTSTAPAARAMALAAGAAWATTWPRRTTGTGTCCWTRPGRSSSARPSRHGATPTCGRQAHRSRTLMRTSETGSSSCCSWRSYQGSGYLSRSGGR

SEQ ID NO: 32984 - protein, 1118 aa, Homo sapiens
LHLHHDPFRSLQEPRHQPPTMGSKERFHWQSHNVKQSGVDDMVLLPQITEDAIAANLRKRFMDDYIFTYIGSVLISVNPFKQMPYFTDREIDLYQGAAQYENPPHIYALTDNMYRNMLIDCENQCVIISGESGAGKTVAAKYIMGYISKVSGGGEKVQHVKDIILQSNPLLEAFGNAKTVRNNNSSRFGKYFEIQFSRGGEPDGGKISNFLLEKSRVVMQNENERNFHIYYQLLEGASQEQRQNLGLMTPDYYYYLNQSDTYQVDGTDDRSDFGETLSAMQVIGIPPSIQQLVLQLVAGILHLGNISFCEDGNYARVESVDLLAFPAYLLGIDSGRLQEKLTSRKMDSRWGGRSESINVTLNVEQAAYTRDALAKGLYARLFDFLVEAINRAMQKPQEEYSIGVLDIYGFEIFQKNGFEQFCINFVNEKLQQIFIELTLKAEQEEYVQEGIRWTPIQYFNNKVVCDLIENKLSPPGIMSVLDDVCATMHATGGGADQTLLQKLQAAVGTHEHFNSWSAGFVIHHYAGKVSYDVSGFCERNRDVLFSDLIELMQTSEQAFLRMLFPEKLDGDKKGRPSTAGSKIKKQANDLVATLMRCTPHYIRCIKPNETKRPRDWEENRVKHQVEYLGLKENIRVRRAGFAYRRQFAKFLQRYAILTPETWPRWRGDERQGVQHLLRAVNMEPDQYQMGSTKVFVKNPESLFLLEEVRERKFDGFARTIQKAWRRHVAVRKYEEMREEASNILLNKKERRRNSINRNFVGDYLGLEERPELRQFLGKRERVDFADSVTKYDRRFKPIKRDLILTPKCVYVIGREKVKKGPEKGQVCEVLKKKVDIQALRGVSLSTRQDDFFILQEDAADSFLESVFKTEFVSLLCKRFEEATRRPLPLTFSDTLQFRVKKEGWGGGGTRSVTFSRGFGDLAVLKVGGRTLTVSVGDGLPKSSKPTRKGMAKGKPRRSSQAPTRAAPAPPRGMDRNGVPPSARGGPLPLEIMSGGGTHRPPRGPPSTSLGASRRPRARPPSEHNTEFLNVPDQGMAGMQRKRSVGQRPVPGVGRPKPQPRTHGPRCRALYQYVGQDVDELSFNVNEVIEILMEDPSGWWKGRLHGQEGLFPGNYVEKI

SEQ ID NO: 32985 - protein, 51 aa, Homo sapiens
LVRTHPERDLTFLRGSLSNLMDFVKKTGICASKWEWGTTHNFLYKHVPRSS

SEQ ID NO: 32986 - protein, 429 aa, Homo sapiens
ISEVKVTELQLTSSELDFQPQQELMLQITNASLGLRFRRQLLYWFFYDGGYINASAEGVSIRTGLELSRDPAGRMKVSNVSCQASVSRMHAAFGGTFKKVYDFLSTFITSGMRFLLNQQICPVLYHAGTVLLNSLLDTVPVRSSVDELVGIDYSLMKDPVASTSNLDMDFRGAFFPLTERNWSLPNRAVEPQLQEEERMVYVAFSEFFFDSAMESYFRAGALQLLLVGDKVPHDLDMLLRATYFGSIVLLSPAVIDSPLKLELRVLAPPRCTIKPSGTTISVTASVTIALVPPDQPEVQLSSMTMDARLSAKMALRGKALRTQLDLRRFRIYSNHSALESLALIPLQAPLKTMLQIGVMPMLNERTWRGVQIPLPEGINFVHEVVTNHAGFLTIGADLHFAKGLREVIEKNRPADVRASTAPTPSTAAV

SEQ ID NO: 32987 - protein, 133 aa, Homo sapiens
KTVYKRDVPCQPCKGQRENYPSPVTKLQEARSQEGKPLSLQNVASTSLMAETAHCTLKPALPTASEINCCNSGTHDAYHSGSSMEPAGSQPFLGPMNSLKRGTEIFLLFVKSLTFPLFFMYTLNCNSSSQIKH

SEQ ID NO: 32988 - protein, 28 aa, Homo sapiens
KPRARRTEEWWTRLEHWPRRSSLPARRV

SEQ ID NO: 32989 - protein, 142 aa, Homo sapiens
RGRHASACRGERSRDRRSRGGSATKETVTGSGAAKEEAVLPGSAPGHSWLAAALSAAKGHRPGTARGGKVAPGAEAAERSPRRRPDWLPRNCGDSPYSELGLRFPGLSPSPEAPTKPGKEGKDSGGSSSMSAYSRKPERARS

SEQ ID NO: 32990 - protein, 12 aa, Homo sapiens
KLSEVFIWWDVF

SEQ ID NO: 32991 - protein, 212 aa, Homo sapiens
KDIFHDLMACVTMDNLQERALHIRKVLLVLPKTTLIIMRYLFAFLNHLSQFSEENMMDPYNLAICFGPSLMSVPEGHDQVSCQAHVNELIKTIIIQHENIFPSPRELEGPVYSRGGSMEDYCDSPHGETTSVEDSTQDVTAEHHTSDDECEPIEAIAKFDYVGRTARELSFKKGASLLLYQRASDDWWEGRHNGIDGLIPHQYIVVQDTLIS

SEQ ID NO: 32992 - protein, 263 aa, Homo sapiens
IASTRNCSSESENCTTHNGGEMTEESEGPNMVIHVCDEAKNLKEDFTCPRDLLISEMKYFAEYLSMDAQRWEEVDISVHCDVHIFNWLIKYIKRNTKENKDCEMPTLEPGNVISILISSEFLKMDSLVEQCIQYCHKNMNAIVATPCNMNCINANLLTRIADLFSHNEVDDLKDKKDKFKSKLFCKKIERLFDPEYLNPDSRSNAATLYRCCLCKKLLTKETERRIPCIPGKINVDRRGNIVYIHIRCREDKIHTCIFVYIYI

SEQ ID NO: 32993 - protein, 14 aa, Homo sapiens
IFTYFRSDTKAGSY

SEQ ID NO: 32994 - protein, 76 aa, Homo sapiens
RRRQVARSRAGAGPGHGRLGAAVRVVAALLRAEGPGLPAAVAEGLCRCLQEEHLTVLSGATKARGGRCRGPAATTG

SEQ ID NO: 32995 - protein, 17 aa, Homo sapiens
MFLTPLSSFQSFTQLCS

SEQ ID NO: 32996 - protein, 32 aa, Homo sapiens
KAWVLDPKGNSGTWRLYGSHLSCLHWWNKCSK

SEQ ID NO: 32997 - protein, 420 aa, Homo sapiens
TATAAAFGAASPAMAAPCAEDPSLERHFKGHRDAVTCVDFSINTKQLASGSMDSCLMVWHMKPQSRAYRFTGHKDAVTCVNFSPSGHLLASGSRDKTVRIWVPNVKGESTVFRAHTATVRSVHFCSDGQSFVTASDDKTVKVWATHRQKFLFSLSQHINWVRCAKFSPDGRLIVSASDDKTVKLWDKSSRECVHSYCEHGGFVTYVDFHPSGTCIAAAGMDNTVKVWDVRTHRLLQHYQLHSAAVNGLSFHPSGNYLITASSDSTLKILDLMEGRLLYTLHGHQGPATTVAFSRTGEYFASGGSDEQVMVWKSNFDIVDHGEVTKVPRPPATLASSMGNLPEVDFPVPPGRGRSVESVQSQPQEPVSVPQTLTSTLEHIVGQLDVLTQTVSILEQRLTLTEDKLKQCLENQQLIMQRATP

SEQ ID NO: 32998 - protein, 45 aa, Homo sapiens
LGRHKTKEWPPRPREAARLSQPALRGPASRKSPSKGTSLQGSQHL

SEQ ID NO: 32999 - protein, 56 aa, Homo sapiens
LETERRGEDLGGWVGEADRRTLEIKRFTDYFILYREHVATPKISPNEHVSVDFTRI

SEQ ID NO: 33000 - protein, 49 aa, Homo sapiens
ICTSTETSYKYSWTQPLYPFPVQVRGCHGDEHDFKGYRESTFKTSRVFP

SEQ ID NO: 33001 - protein, 10 aa, Homo sapiens
IKMIILPCSY

SEQ ID NO: 33002 - protein, 56 aa, Homo sapiens
LHSEKLPLAARSAGPSLLVIIQSSQCPGGRRCPTPACIHPSRVPGVTGPRRQPWFC

SEQ ID NO: 33003 - protein, 36 aa, Homo sapiens
RTEAQPHGSEIHPWTVSRNTDEAEKQPQCFKNTKRQ

SEQ ID NO: 33004 - protein, 78 aa, Homo sapiens
LEQPQGDSMMTCEQAQLLANLARLIQAKKALDLGTFTGYSALALALALPADGRVVTCEVDAQPPELGRPLWRQVSARA

SEQ ID NO: 33005 - protein, 235 aa, Homo sapiens
IKLPSSFEKWEIARGNTPGVPLAYDRYQSGLSTEFQAPLAFQSDVDKEEDKKERQKQYLRHRRLFMDIEREQVKEQQRQKEQKKKIEKIKKKREQECYAAEQRILRMNFHEDPYSGEKLSEILAQLQLQEIKGTREKQQREKEYLRYVEALRAQIQEKMQLYNITLPPLCCCGPDFWDAHPDTCANNCIFYKNHRAYTRALHSFINSCDVPGGNSTLRVAIHNFASAHRRTLKNL

SEQ ID NO: 33006 - protein, 81 aa, Homo sapiens
LASPTGKDAVPERHPVCPARPMLAPVVWGPCVPEEQPWHLSGAGRGPWRPTVDGDHWQGPAPSIPSARDVCVASGPRVRGR

SEQ ID NO: 33007 - protein, 82 aa, Homo sapiens
LPTSHRTLGPLGASPGLMIVQKAAIKGAWEAGWRREQKKPNSADLGTVRAASRNCGQRLCVLAGRACSFLPWQPRAMAIIAL

SEQ ID NO: 33008 - protein, 230 aa, Homo sapiens
LDPARASCFSRLEGPGPRGRTLCPQRLQALISPSGPSFHPSTRPSFQELRRETAGSSRTSVSQASGLLLETPVQPAFSLPKGEREVVTHSDEGGVASLGLAQRVPLRENREMSHTRDSHDSHLMPSPAPVAQPLPGHVVPCPSPFGRAQRVPSPGPPTLTSYSVLRRLTVQPKTRFTPMPSTPRVQQAQWLRGVSPQSCSEDPALPWVSIRSFPLLRSLALCCQPGGPGV

SEQ ID NO: 33009 - protein, 51 aa, Homo sapiens
LEPKLTKKNKSTPDLDSGHLLKPSFRVDIPTSRTVRILKTTQQKVKKWKIV

SEQ ID NO: 33010 - protein, 25 aa, Homo sapiens
VGWDLVTKAEKPLLLGPRGSCPMLC

SEQ ID NO: 33011 - protein, 39 aa, Homo sapiens
LRDRRCESLGFASNFAVAAERPRPSSPLRRPRARMGLVP

SEQ ID NO: 33012 - protein, 771 aa, Homo sapiens
INRTSVALRLAGTGRFVAKTPGHPGSWEMGLLTFRDVAVEFSLEEWEHLEPAQKNLYQDVMLENYRNLVSLGLVVSKPDLITFLEQRKEPWNVKSEETVAIQPDVFSHYNKDLLTEHCTEASFQKVISRRHGSCDLENLHLRKRWKREECEGHNGCYDEKTFKYDQFDESSVESLFHQQILSSCAKSYNFDQYRKVFTHSSLLNQQEEIDIWGKHHIYDKTSVLFRQVSTLNSYRNVFIGEKNYHCNNSEKTLNQSSSPKNHQENYFLEKQYKCKEFEEVFLQSMHGQEKQEQSYKCNKCVEVCTQSLKHIQHQTIHIRENSYSYNKYDKDLSQSSNLRKQIIHNEEKPYKCEKCGDSLNHSLHLTQHQIIPTEEKPCKWKECGKVFNLNCSLYLTKQQQIDTGENLYKCKACSKSFTRSSNLIVHQRIHTGEKPYKCKECGKAFRCSSYLTKHKRIHTGEKPYKCKECGKAFNRSSCLTQHQTTHTGEKLYKCKVCSKSYARSSNLIMHQRVHTGEKPYKCKECGKVFSRSSCLTQHRKIHTGENLYKCKVCAKPFTCFSNLIVHERIHTGEKPYKCKECGKAFPYSSHLIRHHRIHTGEKPYKCKACSKSFSDSSGLTVHRRTHTGEKPYTCKECGKAFSYSSDVIQHRRIHTGQRPYKCEECGKAFNYRSYLTTHQRSHTGERPYKCEECGKAFNSRSYLTTHRRRHTGERPYKCDECGKAFSYRSYLTTHRRSHSGERPYKCEECGKAFNSRSYLIAHQRSHTREKL

SEQ ID NO: 33013 - protein, 143 aa, Homo sapiens
MAAPTSSCTSLMWKGSMSQWKATRSPIKCAPSHPRMRSCRPWRSSSLTWHQAPSMRPGLDMSSAPRRWWKHPLSCACGRLCREEAADTGDDILPHETGLQPGMVPLKYLLEEGVWGAGVGCGVFPAISTAYDHCNNLSPSEEH

SEQ ID NO: 33014 - protein, 39 aa, Homo sapiens
LEAAAMAPERMGWAVEQELASLEKGDHEPHFPFPKKRKA

SEQ ID NO: 33015 - protein, 47 aa, Homo sapiens
RARAPPGALPRRCPPRDPLPTSHHVGPRGQRAAGWDHFGLRSLEKIF

SEQ ID NO: 33016 - protein, 65 aa, Homo sapiens
RALFQCLRVGSMARVSCGGSSPPAPLCSPHLNTEHRYHLGFGKTWRLTTLEAPSVPQPLFGEEAS

SEQ ID NO: 33017 - protein, 14 aa, Homo sapiens
LVLVGDGSSFPISA

SEQ ID NO: 33018 - protein, 13 aa, Homo sapiens
LPILIKEQTCLLS

SEQ ID NO: 33019 - protein, 931 aa, Homo sapiens
KCWTGRENSDANMQRSIMSFFHPKKEGKAKKPEKEASNSSRETEPPPKAALKEWNGVVSESDSPVKRPGRKAARVLGSEGEEEDEALSPAKGQKPALDCSQVSPPRPATSPENNASLSDTSPMDSSPSGIPKRRTARKQLPKRTIQEVLEEQSEDEDREAKRKKEEEEEETPKESLTEAEVATEKEGEDGDQPTTPPKPLKTSKAETPTESVSEPEVATKQELQEEEEQTKPPRRAPKTLSSFFTPRKPAVKKEVKEEEPGAPGKEGAAEGPLDPSGYNPAKNNYHPVEDACWKPGQKVPYLAVARTFEKIEEVSARLRMVETLSNLLRSVVALSPPDLLPVLYLSLNHLGPPQQGLELGVGDGVLLKAVAQATGRQLESVRAEAAEKGDVGLVAENSRSTQRLMLPPPPLTASGVFSKFRDIARLTGSASTAKKIDIIKGLFVACRHSEARFIARSLSGRLRLGLAEQSVLAALSQAVSLTPPGQEFPPAMVDAGKGKTAEARKTWLEEQGMILKQTFCEVPDLDRIIPVLLEHGLERLPEHCKLSPGIPLKPMLAHPTRGISEVLKRFEEAAFTCEYKYDGQRAQIHALEGGEVKIFSRNQEDNTGKYPDIISRIPKIKLPSVTSFILDTEAVAWDREKKQIQPFQVLTTRKRKEVDASEIQVQVCLYAFDLIYLNGESLVREPLSRRRQLLRENFVETEGEFVFATSLDTKDIEQIAEFLEQSVKDSCEGLMVKTLDVDATYEIAKRSHNWLKLKKDYLDGVGDTLDLVVIGAYLGRGKRAGRYGGFLLASYDEDSEELQAICKLGTGFSDEELEEHHQSLKALVLPSPRPYVRIDGAVIPDHWLDPSAVWEVKCADLSLSPIYPAARGLVDSDKGISLRFPRFIRVREDKQPEQATTSAQVACLYRKQSQIQNQQGEDSGSDPEDTY

SEQ ID NO: 33020 - protein, 103 aa, Homo sapiens
RSQEGKPLSLQNVASTSLMAETAHCTLKPALPTASEINCCNSGTHDAYHSGSSMEPAGSQPFLGPMNSLKRGTEIFLLFVKSLTFPLFFMYTLNCNSSSQIKH

SEQ ID NO: 33021 - protein, 313 aa, Homo sapiens
LQGSTSPPSSTAQHQNTLFLDSDMGSSKKVTLSVLSREQSEGVGARVRRSIGRPELKNLDPFLLFDEFKGGRPGGFPDHPHRGFETVSYLLEGGSMAHEDFCGHTGKMNPGDLQWMTAGRGILHAEMPCSEEPAHGLQLWVNLRSSEKMVEPQYQELKSEEIPKPSKDGVTVAVISGEALGIKSKVYTRTPTLYLDFKLDPGAKHSQPIPKGWTSFIYTISGDVYIGPDDAQQKIEPHHTAVLGEGDSVQVENKDPKRSHFVLIAGEPLREPVIQHGPFVMNTNEEISQAILDFRNAKNGFERAKTWKSKIGN

SEQ ID NO: 33022 - protein, 37 aa, Homo sapiens
MEESLAEMSIMTTELQSLCSLLQESKEEAIRTLQRKM

SEQ ID NO: 33023 - protein, 232 aa, Homo sapiens
MPLPDTMFCAQQIHIPPELPDILKQFTKAAIRTQPADVLRWSAGYFSALSRGDPLPVKDRMEMPTATQKTDTGLTQGLLKVLHKQCHHKRYVELTDLEQKWKNLCLPKEKFKALLQLDPCENKIKWINFLALGCSMLGGSLNTALKHLCEILTDDPEGGPARIPFKTFSYVYRYLARLDSDVSPLETESYLASLKENMVLSWLSTTRIWREESLMIHRSAMLGSEHGRARRG

SEQ ID NO: 33024 - protein, 72 aa, Homo sapiens
VPESNQKMKDSYLILDEYMRFLNCRKGRKDPSKSILDVGVEEAIKFSGFDEKMFLKRGGKYIWSKADLKLDW

SEQ ID NO: 33025 - protein, 86 aa, Homo sapiens
TPGCSPWMPTLSRPCGITPSSLTLSWRASACTAATWSASAAAPSRSKVTCAAWSWGTTASQRTTKRRQPPSTPCRACGGWTCQETP

SEQ ID NO: 33026 - protein, 29 aa, Homo sapiens
LTANPSVFRRHMKQKGMNSWENCRRKKKK

SEQ ID NO: 33027 - protein, 297 aa, Homo sapiens
ISSTSTDRLTVLKTKPQSIQRDIITVCNDPYTLAQQLTHIELERLNYIGPEEFVQAFVQKDPLDNDKSCYSERKKTRNLEAYVEWFNRLSYLVATEICMPVKKKHRARMIEYFIDVARECFNIGNFNSLMAIISGMNMSPVSRLKKTWAKVKTAKFDILEHQMDPSSNFYNYRTALRGAAQRSLTAHSSREKIVIPFFSLLIKDIYFLNEGCANRLPNGHVNFEKFWELAKQVSEFMTWKQVECPFERDRKILQYLLTVPVFSEDALYLASYESEGPENHIEKDRWKSLRSSLLGRV

SEQ ID NO: 33028 - protein, 592 aa, Homo sapiens
LSPPPAMATATPVPPRMGSRAGGPTTPLSPTRLSRLQEKEELRELNDRLAVYIDKVRSLETENSALQLQVTEREEVRGRELTGLKALYETELADARRALDDTARERAKLQIELGKCKAEHDQLLLNYAKKESDLNGAQIKLREYEAALNSKDAALATALGDKKSLEGDLEDLKDQIAQLEASLAAAKKQLADETLLKVDLENRCQSLTEDLEFRKSMYEEEINETRRKHETRLVEVDSGRQIEYEYKLAQALHEMREQHDAQVRLYKEELEQTYHAKLENARLSSEMNTSTVNSAREELMESRMRIESLSSQLSNLQKESRACLERIQELEDLLAKEKDNSRRMLTDKEREMAEIRDQMQQQLNDYEQLLDVKLALDMEISAYRKLLEGEEERLKLSPSPSSRVTVSRASSSRSVRTTRGKRKRVDVEESEASSSVSISHSASATGNVCIEEIDVDGKFIRLKNTSEQDQPMGGWEMIRKIGDTSVSYKYTSRYVLKAGQTVTIWAANAGVTASPPTDLIWKNQNSWGTGEDVKVILKNSQGEEVAQRSTVFKTTIPEEEEEEEEAAGVVVEEELFHQQGTPRASNRSCAIM

SEQ ID NO: 33029 - protein, 11 aa, Homo sapiens
IKSPELSKKEF

SEQ ID NO: 33030 - protein, 75 aa, Homo sapiens
LPRTPRGVHLMLVGTQSAQPSLRHCVSRAGPQTRPPLPHPSQGGACVGRTLNPAARPLDGRRRDGWPPCTAPAVS

SEQ ID NO: 33031 - protein, 27 aa, Homo sapiens
RSSEQMPPEDFCAWKISVNRLLLHLRK

SEQ ID NO: 33032 - protein, 73 aa, Homo sapiens
LPIAAGGHFALELTTPEQGRDSPDAGRLFCPFGDTSPPLPGPASLKGSPCSCLDAGFFSGSGKPASRDDAPQR

SEQ ID NO: 33033 - protein, 52 aa, Homo sapiens
RCLLQNVKVFLESPLPHIPWTIPPLSIHPRIMASLLITTNPWIMMLPERSAI

SEQ ID NO: 33034 - protein, 44 aa, Homo sapiens; identical to SEQ ID NO: 24156

SEQ ID NO: 33035 - protein, 95 aa, Homo sapiens
VNRSQHVVSQDLASLLTLMRKLKIPRPIQKSLKEKFQEILRYISRMSKKTVPQMTQKTVLLREQLMFIPQNMLDVMAEMQLIPFLGILKKFPALN

SEQ ID NO: 33036 - protein, 35 aa, Homo sapiens
VAVWALGNSCPASGYLCHAPPGRATHLQTSSANGR

SEQ ID NO: 33037 - protein, 36 aa, Homo sapiens
RTETSPCTSPIPSCVTWAAPLGSMGRTSRRQPWWTW

SEQ ID NO: 33038 - protein, 159 aa, Homo sapiens
RQEGRLVSPSLQLHCCPQRAKLEAAIAEAEERGELALKDARAKQEELEAALQRGKQDMARQLREYQELMSVKLALDIEIATYRKLLEGEESRLAGDGVGAVNISVMNSTGGSSSGGGIGLTLGGTMGSNALSFSSSAGPGLLKAYSIRTASASRRSARD

SEQ ID NO: 33039 - protein, 802 aa, Homo sapiens
IMKTSPRRPLILKRRRLPLPVQNAPSETSEEEPKRSPAQQESNQAEASKEVAESNSCKFPAGIKIINHPTMPNTQVVAIPNNANIHSIITALTAKGKESGSSGPNKFILISCGGAPTQPPGLRPQTQTSYDAKRTEVTLETLGPKPAARDVNLPRPPGALCEQKRETCADGEAAGCTINNSLSNIQWLRKMSSDGLGSRSIKQEMEEKENCHLEQRQVKVEEPSRPSASWQNSVSERPPYSYMAMIQFAINSTERKRMTLKDIYTWIEDHFPYFKHIAKPGWKNSIRHNLSLHDMFVRETSANGKVSFWTIHPSANRYLTLDQVFKPLDPGSPQLPEHLESQQKRPNPELRRNMTIKTELPLGARRKMKPLLPRVSSYLVPIQFPVNQSLVLQPSVKVPLPLAASLMSSELARHSKRVRIAPKVFGEQVVFGYMSKFFSGDLRDFGTPITSLFNFIFLCLSVLLAEEGIAPLSSAGPGKEEKLLFGEGFSPLLPVQTIKEEEIQPGEEMPHLARPIKVESPPLEEWPSPAPSFKEESSHSWEDSSQSPTPRPKKSYSGLRSPTRCVSEMLVIQHRERRERSRSRRKQHLLPPCVDEPELLFSEGPSTSRWAAELPFPADSSDPASQLSYSQEVGGPFKTPIKETLPISSTPSKSVLPRTPESWRLTPPAKVGGLDFSPVQTSQGASDPLPDPLGLMDLSTTPLQSAPPLESPQRLLSSEPLDLISVPFGNSSPSDIDVPKPGSPEPQVSGLAANRSLTEGLVLDTMNDSLSKILLDISFPGLDEDPLGPDNINWSQFIPELQ

SEQ ID NO: 33040 - protein, 32 aa, Homo sapiens
LRYFADPACDGSADTIQIGKLVHLILCPPPRN

SEQ ID NO: 33041 - protein, 39 aa, Homo sapiens
RHPCPEGLSRLQPVTPHTRLRPRRRVGTCTCGASAGVSP

SEQ ID NO: 33042 - protein, 74 aa, Homo sapiens
KLRMLFPQVTEIQRYLQKERNLSTQMSHPNLEKIKELQSLLQTLRSFMKLILRKWSPLINILREKRNILKNTIP

SEQ ID NO: 33043 - protein, 244 aa, Homo sapiens
LAGQPFFDAIFTQLNCQVSWFLPEGSKLVPVARVAEVRGPAHCLLLGERVALNTLARCSGIASAAAAAVEAARGAGWTGHVAGTRKTTPGFRLVEKYGLLVGGAASHRYDLGGLVMVKDNHVVAAGGVEKAVRAARQAADFTLKVEVECSSLQEAVQAAEAGADLVLLDNFKPEELHPTATVLKAQFPSVAVEASGGITLDNLPQFCGPHIDVISMGMLTQAAPALDFSLKLFAKEVAPVPKIH

SEQ ID NO: 33044 - protein, 472 aa, Homo sapiens
RMAFLQKIEALVKDMQNPETGVRMQNQRVLVTSVPHAMTGSDVLQWIVQRLWISSLEAQNLGNFIVRYGYIYPLQDPKNLILKPDGSLYRFQTPYFWPTQQWPAEDTDYAIYLAKRNIKKKGILEEYEKENYNFLNQKMNYKWDFVIMQAKEQYRAGKERNKADRYALDCQEKAYWLVHRCPPGMDNVLDYGLDRVTNPNEVKKQTVVAVKKEIMYYQQALMRSTVKSSVSLGGIVKYSEQFSSNDAIMSGCLPSNPWITDDTQFWDLNAKLVEIPTKMRVERWAFNFSELIRDPKGRQSFQYFLKKEFSGENLGFWEACEDLKYGDQSKVKEKAEEIYKLFLAPGARRWINIDGKTMDITVKGLKHPHRYVLDAAQTHIYMLMKKDSYARYLKSPIYKDMLAKAIEPQETTKKSSTLPFMRRHLRSSPSPVILRQLEEEAKAREAANTVDITQVMSKLDRRSQLQKELPPK

SEQ ID NO: 33045 - protein, 228 aa, Homo sapiens
VEDLIISELRERFPSHRFIAEEAAASGAKCVLTHSPTWIIDPIDGTCNFVHRFPTVAVSIGFAVRQELEFGVIYHCTEERLYTGRRGRGAFCNGQRLRVSGETDLSKALVLTEIGPKRDPATLKLFLSNMERLLHAKAHGVRVIGSSTLALCHLASGAADAYYQFGLHCWDLAAATVIIREAGGIVIDTSGGPLDLMACRVVAASTREMAMLIAQALQTINYGRDDEK

SEQ ID NO: 33046 - protein, 140 aa, Homo sapiens
VQGQFLPPPEQPLTPSVNEAVTGHPPFPAHSETVGSGPSSLGFPDWDPNTHAAYTDSPYSCPASAAENFLPPDFYPPSDPGQPCPFPQGMEAGPWRVSAPPSGPPQFPAVVPGPSLEVARAHMLALGPQQLLAQDEEGDT

SEQ ID NO: 33047 - protein, 12 aa, Homo sapiens
KEEEGGCWPWIS

SEQ ID NO: 33048 - protein, 38 aa, Homo sapiens
MKNLTSIFHCLLRVQMKMMKSSSDPLDIKKDVLLPAWN

SEQ ID NO: 33049 - protein, 861 aa, Homo sapiens
MELGPLEGGYLELLNSDADPLCLYHFYDQMDLAGEEEIELYSEPDTDTINCDQFSRLLCDMEGDEETREAYANIAELDQYVFQDSQLEGLSKDIFIEHIGPDEVIGESMEMPAEVGQKSQKRPFPEELPADLKHWKPVPFSSSSLSCLNLPEGPIQFVPTISTLPHGLWQISEAGTGVSSIFIYHGEVPQASQVPPPSGFTVHGLPTSPDRPGSTSPFAPSATDLPSMPEPALTSRANMTEHKTSPTQCPAAGEVSNKLPKWPEPVEQFYRSLQDTYGAEPAGPDGILVEVDLVQARLERSSSKSLERELATPDWAERQLAQGGLAEVLLAAKEHRRPRETRVIAVLGKAGQGKSYWAGAVSRAWACGRLPQYDFVFSVPCHCLNRPGDAYGLQDLLFSLGPQPLVAADEVFSHILKRPDRVLLILDGFEELEAQDGFLHSTCGPAPAEPCSLRGLLAGLFQKKLLRGCTLLLTARPRGRLVQSLSKADALFELSGFSMEQAQAYVMRYFESSGMTEHQDRALTLLRDRPLLLSHSHSPTLCRAVCQLSEALLELGEDAKLPSTLTGLYVGLLGRAALDSPPGALAELAKLAWELGRRHQSTLQEDQFPSADVRTWAMAKGLVQHPPRAAESELAFPSFLLQCFLGALWLALSGEIKDKELPQYLALTPRKKRPYDNWLEGVPRFLAGLIFQPPARCLGALLGPSAAASVDRKQKVLARYLKRLQPGTLRARQLLELLHCAHEAEEAGIWQHVVQELPGRLSFLGTRLTPPDAHVLGKALEAAGQDFSLDLRSTGICPSGLGSLVGLSCVTRFRWGEGLGEETSLCWALTAVLVPSPVLCGVSFSMQSSRVGQNGFSPFLR

SEQ ID NO: 33050 - protein, 122 aa, Homo sapiens
MINPLEYKYKNGASPVLEVQLTKDLICFFDSSVELRNSMESQQRIRMMKELDVCSPEFSFLRAESEVKKQKGRMLGDVLMDQNVLPGVGNIIKNEALFDSGLHPAVKIQCSRVKKILLSLAT

SEQ ID NO: 33051 - protein, 213 aa, Homo sapiens
MHEAAIHGHQLSLRNLISQGWAVNIITADHVSPLHEACLGGHLSCVKILLKHGAQVNGVTADWHTPLFNACVSGSWDCVNLLLQHGASVQPESDLASPIHEAARRAYGGNIDHKISHLGTPLYLACENQQRACVKKLLESGADVNQGKGQDSPLHAVARTASEELACLLMDFGADTQAKNAEGKRPVELVPPESPLAQLFLEREGASLPKPKP

SEQ ID NO: 33052 - protein, 228 aa, Homo sapiens
TNSSTKVLQDASNSIDHRIPNSQRKISADTIGDEGFFDLLSRFQSNRMDDQRCCLQEKNCHTASTTTSSTPPKMMLKTSSVPVVSPNTDEFLDLLASSQSRRLDDQRASFSNLPGLRLTQNSQSVLSHLMTNDNKEADEDFFDILVKCQGSRLDDQRCAPPPATTKGPTVPDEDFFSLILRSQGKRMDEQRVLLQRDQNRDTDFGLKDFLQNNALLEFKNSGKKSADH

SEQ ID NO: 33053 - protein, 106 aa, Homo sapiens
ILPAAARQQRKKRGKSYSFPIQLKHYILALAALHCSSVLLVEIWILRREHSTALSSQENSRCKKLQCINCREESTVLQAERATTALLFNEREKMKERENFRRLGPI

SEQ ID NO: 33054 - protein, 363 aa, Homo sapiens
VTYTFRGFRSTKSETNHSSLRNIWKETVPQTLRPQTATNSNNTDLSPQGVTGLENTLSANGSIYNEKGTGHPNSYHFKYIINEPEKCQEKSPFLILLIAAEPGQIEARRAIRQTWGNESLAPGIQITRIFLLGLSIKLNGYLQRAILEESRQYHDIIQQEYLDTYYNLTIKTLMGMNWVATYCPHIPYVMKTDSDMFVNTEYLINKLLKPDLPPRHNYFTGYLMRGYAPNRNKDSKWYMPPDLYPSERYPVFCSGTGYVFSGDLAEKIFKVSLGIRRLHLEDVYVGICLAKLRIDPVPPPNEFVFNHWRVSYSSCKYSHLITSHQFQPSELIKYWNHLQQNKHNACANAAKEKAGRYRHRKLH

SEQ ID NO: 33055 - protein, 25 aa, Homo sapiens
KCCTPLAQAPTAAARRSGGRVMARY

SEQ ID NO: 33056 - protein, 33 aa, Homo sapiens
RCPLCPNPIPLLNLILSFRKPRSSTLTVVLEET

SEQ ID NO: 33057 - protein, 17 aa, Homo sapiens
KMELNSIRRKVTTAPKE

SEQ ID NO: 33058 - protein, 211 aa, Homo sapiens
LTLGLRNARKKDQMAKQPSDVSSECDREGRQLQPAERPPQLRPGAPTSLQTEPQGNPEGNHGGEGDSCPHGSPQGPLAPPASPGPFATRSPLFIFMRRSSLLSRSSSGYFSFDTDRSPAPMSCDKSTQTPSPPCQAFNHYLSAMASMRQAEPADMRPEIWIAQELRRIGDEFNAYYARRVFLNNYQAAEDHPRMVILRLLRYIVRLVWRMH

SEQ ID NO: 33059 - protein, 34 aa, Homo sapiens
LPSPSPPGCTSTEAPVRARSWGSPTCWAMCTRTC

SEQ ID NO: 33060 - protein, 26 aa, Homo sapiens
LPVFPTSRDGFAHYQASFPCRHREEG

SEQ ID NO: 33061 - protein, 89 aa, Homo sapiens
MSFMVSQTQVLPVKGVQVLGALNKELDKTHKQSKKRKKQQKQRCIENENTLHRVGAGRASSSRAQLQNFLGFKYPLEVSIGYLVYTLCI

SEQ ID NO: 33062 - protein, 41 aa, Homo sapiens
RFTVTTKAVTIWKAKIPDMQTGHPFSIMRFKMGMRRYFSEE

SEQ ID NO: 33063 - protein, 50 aa, Homo sapiens
LVVQSLKILGTIFCIDSYTTKEYTSIFIKFIMSFRLHLEWKLNMHILWRL

SEQ ID NO: 33064 - protein, 131 aa, Homo sapiens
VPEASGLGTHGRDTQGRPCAVSPGITGGDFMEPGGWASGWGERLQTGSSPWLCPPLSLLEWWGPCILSCPPPPFSPNCRRLLSPGDTVPASSGLGKHGLSSPALAPAPPASWTWAFLHPVEPHSQERCLEG

SEQ ID NO: 33065 - protein, 449 aa, Homo sapiens
RWRRPRPGWVPTALGGAMDEAVGDLKQALPCVAESPTVHVEVHQRGSSTAKKEDINLSVRKLLNRHNIVFGDYTWTEFDEPFLTRNVQSVSIIDTELKVKDSQPIDLSACTVALHIFQLNEDGPSSENLEEETENIIAANHWVLPAAEFHGLWDSLVYDVEVKSHLLDYVMTTLLFSDKNVNSNLITWNRVVLLHGPPGTGKTSLCKALAQKLTIRLSSRYRYGQLIEINSHSLFSKWFSESGKLVTKMFQKIQDLIDDKDALVFVLIDEVESLTAARNACRAGTEPSDAIRVVNAVLTQIDQIKRHSNVVILTTSNITEKIDVAFVDRADIKQYIGPPSAAAIFKIYLSCLEELMKCQIIYPRQQLLTLRELEMIGFIENNVSKLSLLLNDISRKSEGLSGRVLRKLPFLAHALYVQAPTVTIEGFLQALSLAVDKQFEERKKLAAYI

SEQ ID NO: 33066 - protein, 15 aa, Homo sapiens
VMPKAVDRVGSPPWD

SEQ ID NO: 33067 - protein, 147 aa, Homo sapiens
ITRWEQPERSRASAPMLLRMSEHRNEALGNYLEMRLKSSFLRGLGSWKSNPLRLGGWTILLTLTMGQGEPGGPQGDPWVPHELLLPSLCDSSHASSWGSGSITCAWRGGDSSSHPLVSGHILSNSPVAAVMCSSMGTHLSPFKGTLL

SEQ ID NO: 33068 - protein, 49 aa, Homo sapiens
RLETSAPGGEESGALQGCCGREHQPGTYPGREKSTPGPPSWQWSLTGAL

SEQ ID NO: 33069 - protein, 46 aa, Homo sapiens
LKHFSVSRSRKRRQLPRHTERLTDTRFGKLCRHLWSSYCPKLYSCA

SEQ ID NO: 33070 - protein, 7 aa, Homo sapiens
MTRSRRR

SEQ ID NO: 33071 - protein, 109 aa, Homo sapiens
RWGLWPSGAERQSPPPQSDFPLPPKGKHEERQDEHGYISRCFTRKYTLPPGVDPTQVSSSLSPEGTLTVEAPMPKLATQSNEITIPVTFESRAQLGGPEAAKSDETAAK

SEQ ID NO: 33072 - protein, 39 aa, Homo sapiens
LGTLLQEYGLLQRRLENLENLLRNRNFWILRLPPGACGI

SEQ ID NO: 33073 - protein, 21 aa, Homo sapiens
LPLQKELPFVTRRGRRSTLGP

SEQ ID NO: 33074 - protein, 78 aa, Homo sapiens
RAGAARRQGGRIQWKCVTSCRYCPWTGRSPSTSSAAEEPSASAPAPLSSAAPIPGSSLRGVELFPMTVLIRLHYTFVC

SEQ ID NO: 33075 - protein, 86 aa, Homo sapiens
VPRRWFCPDVSWNNAEDCLSGSRPIQFTSSRKYLTPALDPAALLRAEEGGNPMCLLPELPQPIFPQLGTWKKEPRTRLCFSFGPSW

SEQ ID NO: 33076 - protein, 62 aa, Homo sapiens
RAGQWADRVRGIQSLPALITVLFPGAHFVPGTRLGASRPLSLRSLLWTWRPFQRCLPEVPKI

SEQ ID NO: 33077 - protein, 92 aa, Homo sapiens
ILSSHRSNFKDPLQVANFLKDSYTALTSITAQIQNGEELLSAGKEARVFLEDVKSWEVSDPEEQLKKLINFMKMLSQKLKSYDTWINICLTD

SEQ ID NO: 33078 - protein, 56 aa, Homo sapiens
IFMAWISVPTRPNCFKMRYPSLTFSFLSTCHLTQDCALTLLLQLPLPGLLVLALWQ

SEQ ID NO: 33079 - protein, 75 aa, Homo sapiens
TPMLKSASLSGSPRAPRWASSSRWRRAASWTSTWRLQDQITKEFTKETENPVGNTHLLLTWMEHTNFVLVTGCPP

SEQ ID NO: 33080 - protein, 93 aa, Homo sapiens
IKTELPLGARRKMKPLLPRVSSYLVPIQFPVNQSLVLQPSVKVPLPLAASLMSSELARHSKRVRIAPKVGVLFSSEERFWPIKNVGPSACKAL

SEQ ID NO: 33081 - protein, 46 aa, Homo sapiens
VITLNPGDLVALVFQVERCATWERKPSGQLTVLLQRMRRSMLWRRC

SEQ ID NO: 33082 - protein, 73 aa, Homo sapiens
RLPLNPLSSINTWLSRNNYDLGPGPSGIFTPNLNFITLERETVEWNDSPELQIEGIFSSDFDLNGGNTFMAPL

SEQ ID NO: 33083 - protein, 244 aa, Homo sapiens
VIPKEVDKIVFDAGFFRVESPVKLFSGLSVSSEGPSQRLGTPKSVNKAVSQSRNEMGIPQQTTSPENAGPQNTKSEHVKKTLFLSIPESRSSIEDAQCPGLPDLIEENHVVNKTDLKVDCLSSERMSLPLLAGGVADDINTNKKEGISDVVEGMELNSSITSQDVLMSSPEKNTASQNSILEEGETKISQSELFDNKSLTTECHLLDSVGSCYVARAGLEVLGSSDPTTSASRVAGTTARSKLQ

SEQ ID NO: 33084 - protein, 15 aa, Homo sapiens
KRWMRLLLSSSRGPS

SEQ ID NO: 33085 - protein, 15 aa, Homo sapiens
IYTLHKSSFYHMLTL

SEQ ID NO: 33086 - protein, 63 aa, Homo sapiens
VAAASTSRSRAARCPRGARTALQFSWSSLRSSCEPTMSSFASTRTARTEPPCSEPSAFWALRL

SEQ ID NO: 33087 - protein, 275 aa, Homo sapiens
IVLHSLDLRANCYQRFVVPLLSISADFYVRVFVRVFTGQAKVKASASKQALVFQCVGCGAFHLQRLGKASGVPSGRAKFSAACGPPVTPECEHCGQRHQLGGPMWAEPIHDLDFVGRVLEAVSANPGRFHTSERIRGVLSVITEELPDVPLYYTLDQLSSTIHCNTPSLLQLRSALLHADFRVSLSHACKNAVKTDAPASALWDIMRCWEKECPVKRERLSETSPAFRILSVEPRLQANFTIREDANPSSRQRGLKRFQANPEANWGPRPRARPG

SEQ ID NO: 33088 - protein, 728 aa, Homo sapiens
RCLRRRGGPYKTEPATDLGRWRLNCERGRQTWTYLQDERAGREQTGLEAYALGLDTKNYFKDLPKAHTAFEGALNGMTFYVGLQAEDGHWTGDYGGPLFLLPGLLITCHVARIPLPAGYREEIVRYLRSVQLPDGGWGLHIEDKSTVFGTALNYVSLRILGVGPDDPDLVRARNILHKKGGAVAIPSWGKFWLAVLNVYSWEGLNTLFPEMWLFPDWAPAHPSTLWCHCRQVYLPMSYCYAVRLSAAEDPLVQSLRQELYVEDFASIDWLAQRNNVAPDELYTPHSWLLRVVYALLNLYEHHHSAHLRQRAVQKLYEHIVADDRFTKSISIGPISKTINMLVRWYVDGPASTAFQEHVSRIPDYLWMGLDGMKMQGTNGSQIWDTAFAIQALLEAGGHHRPEFSSCLQKAHEFLRLSQVPDNPPDYQKYYRQMRKGGFSFSTLDCGWIVSDCTAEALKAVLLLQEKCPHVTEHIPRERLCDAVAVLLNMRNPDGGFATYETKRGGHLLELLNPSEVFGDIMIDYTYVECTSAVMQALKYFHKRFPEHRAAEIRETLTQGLEFCRRQQRADGSWEGSWGVCFTYGTWFGLEAFACMGQTYRDGTACAEVSRACDFLLSRQMADGGWGEDFESCEERRYLQSAQSQIHNTCWAMMGLMAVRHPDIEAQERGVRCLLEKQLPNGDWPQENIAGVFNKSCAISYTSYRNIFPIWALGRFSQLYPERALAGHP

SEQ ID NO: 33089 - protein, 62 aa, Homo sapiens
KQPQLWVLHLRSWTCWACAPHCSPWWGCSPSGASSLRSARSSRSAAAGNASSRGPAAPGARS

SEQ ID NO: 33090 - protein, 120 aa, Homo sapiens
KGQRENYPSPVTKLQEARSQEGKPLSLQNVASTSLMAETAHCTLKPALPTASEINCCNSGTHDAYHSGSSMEPAGSQPFLGPMNSLKRGTEIFLLFVKSLTFPLFFMYTLNCNSSSQIKH

SEQ ID NO: 33091 - protein, 56 aa, Homo sapiens
RKDRQRPMPMWTTRRPPRWPSWPGGLGSRRLQPRRHQPVNQPEGNRPVPSPCSPPR

SEQ ID NO: 33092 - protein, 23 aa, Homo sapiens
VPAPRLCPTTDSAKDQNSCETNS

SEQ ID NO: 33093 - protein, 38 aa, Homo sapiens
IPESKREELGFANLVALSVSCFSKAAVQKERRYQEGTC

SEQ ID NO: 33094 - protein, 47 aa, Homo sapiens
LAGCACSRWAVAAAASRRFEIRRVREAGRDLAQGRCGRRLQRRDSCG

SEQ ID NO: 33095 - protein, 56 aa, Homo sapiens
ILDVRDEKDGGAREAESRAHTGSSSRGKRKRQQHPKKERAGVSTVQKAKKKQKKRD

SEQ ID NO: 33096 - protein, 36 aa, Homo sapiens
LVRKALQDMSVRPDAWPLAAWEVAGAAFAFARDSSN

SEQ ID NO: 33097 - protein, 326 aa, Homo sapiens
RFDELKSSGSSPVDNQYNSLMAAGESPVETLATYIKSSLLDIHGEFQETPVGHDAVSKTGRHSIASTRNCSSESENCTTHNGGEMTEESEGPNMVIHVCDEAKNLKEDFTCPRDLLISEMKYFAEYLSMDAQRWEEVDISVHCDVHIFNWLIKYIKRNTKENKDCEMPTLEPGNVISILISSEFLKMDSLVEQCIQYCHKNMNAIVATPCNMNCINANLLTRIADLFSHNEVDDLKDKKDKFKSKLFCKKIERLFDPEYLNPDSRSNAATLYRCCLCKKLLTKETERRIPCIPGKINVDRRGNIVYIHIRCREDKIHTCIFVYIYI

SEQ ID NO: 33098 - protein, 9 aa, Homo sapiens
VSQLLIKLL

SEQ ID NO: 33099 - protein, 41 aa, Homo sapiens
RSIFTGLMIDPRTKALVLNGKPGHLQFYSLQSDKQLYNVRF

SEQ ID NO: 33100 - protein, 55 aa, Homo sapiens
LPAGFLLTGPELYCKTLVSFPSLRVGCLLKSSIRLKKHLIQMRRRCCSFCAGMLL

SEQ ID NO: 33101 - protein, 127 aa, Homo sapiens
LRRRDYHMERPLLNQEHLEELGRWGSAPRTHQWRTWLQCSRARAYALLLQHLPVLVWLPRYPVRDWLLGDLLSGLSVAIMQLPQGLAYALLAGLPPVFGLYSSFYPVFIYFLFGTSRHISVGKWRQA

SEQ ID NO: 33102 - protein, 107 aa, Homo sapiens
ITGGDFMEPGGWASGWGERLQTGSSPWLCPPLSLLEWWGPCILSCPPPPFSPNCRRLLSPGDTVPASSGLGKHGLSSPALAPAPPASWTWAFLHPVEPHSQERCLEG

SEQ ID NO: 33103 - protein, 29 aa, Homo sapiens
KSVTDHCNMPSLLDHYIHSDCEWIALVDF

SEQ ID NO: 33104 - protein, 74 aa, Homo sapiens
RDSGHPRRRAEGAVSTRTQADPLAPCAPSPACWRPGRVRPGCSSSSAFSLPRAQARRTAVPQIRLLQVHLSEKK

SEQ ID NO: 33105 - protein, 9 aa, Homo sapiens
INDKRMLAQ

SEQ ID NO: 33106 - protein, 68 aa, Homo sapiens
LTVSCCCCCYYLQGPQKWNTERRSVRMPICPASTPQPPQGTSCPSAGAKEPVLCLNVATWCSGLMKGM

SEQ ID NO: 33107 - protein, 14 aa, Homo sapiens
KEPSSSPWRTRRCP

SEQ ID NO: 33108 - protein, 38 aa, Homo sapiens
IETDLIQSWTVWLACCLSHKMLLISWTNFQFLGSASVT

SEQ ID NO: 33109 - protein, 12 aa, Homo sapiens
RQSLKNLSWKKY

SEQ ID NO: 33110 - protein, 158 aa, Homo sapiens
LPGATLSPDPACRCRATAMNSGAMRIHSKGHFQGGIQVKNEKNRPSLKSLKTDNRPEKSKCKPLWGKVFYLDLPSVTISEKLQKDIKDLGGRVEEFLSKDISYLISNKKEAKFAQTLGRISPVPSPESAYTAETTSPHPSHDGSSFKSPDTVSLLNML

SEQ ID NO: 33111 - protein, 20 aa, Homo sapiens
KIQPESVEVTPQWRDSSPCV

SEQ ID NO: 33112 - protein, 33 aa, Homo sapiens
TATAAPDLGDHVLPLQKELPFVTRRGRRSTLGP

SEQ ID NO: 33113 - protein, 44 aa, Homo sapiens
ISVSAEPSVHLQAIMSCKKQRSRKHSVNEKCNMKIEHYFSPVCL

SEQ ID NO: 33114 - protein, 47 aa, Homo sapiens
LQVLKAYTLYRPEQGYCQAQGPVAAVLLMHLPPEVSDLDPALGTLVT

SEQ ID NO: 33115 - protein, 19 aa, Homo sapiens
TPGRMPRIPLWPSTSTRAL

SEQ ID NO: 33116 - protein, 580 aa, Homo sapiens
IMAVFNQKSVSDMIKEFRKNWRALCNSERTTLCGADSMLLALQLSMAENNKQHSGEFTVSLSDVLLTWKYLLHEKLNLPVENMDVTDHYEDVRKIYDDFLKNSNMLDLIDVYQKCRALTSNCENYNTVSPSQLLDFLSGKQYAVGDETDLSIPTSPTSKYNRDNEKVQLLARKIIFSYLNLLVNSKNDLAVAYILNIPDRGLGREAFTDLKHAAREKQMSIFLVATSFIRTIELGGKGYAPPPSDPLRTHVKGLSNFINFIDKLDEILGEIPNPSIAGGQILSVIKMQLIKGQNSRDPFCKAIEEVAQDLDLRIKNIINSQEGVVALSTTDISPARPKSHAINHGTAYCGRDTVKALLVLLDEEAANAPTKNKAELLYDEENTIHHHGTSILTLFRSPTQVNNSIKPLRERICVSMQEKKIKMKQTLIRSQFACTYKDDYMISKDNWNNVNLASKPLCVLYMENDLSEGVNPSVGRSTIGTSFGNVHLDRSKNEKVSRKSTSQTGNKSSKRKQVDLDGENILCDNRNEPPQHKNAKIPKKSNDSQNRLYGKLAKVAKSNKCTAKDKLISGQAKLTQFFRL

SEQ ID NO: 33117 - protein, 502 aa, Homo sapiens
LRAFGNWKTWWRTRVRTCILPQRVIDVSGMWDQRLVRLALLQHLRAFYGIKVKGVRGQCDRRRHETAATEIGGKIFGVPFNALPHSAVPEYGHIPSFLVDACTSLEDHIHTEGLFRKSGSVIRLKALKNKVDHGEGCLSSAPPCDIAGLLKQFFRELPEPILPADLHEALLKAQQLGTEEKNKATLLLSCLLADHTVHVLRYFFNFLRNVSLRSSENKMDSSNLAVIFAPNLLQTSEGHEKMSSNTEKKLRLQAAVVQTLIDYASDIGRVPDFILEKIPAMLGIDGLCATPSLEGFEEGEYETPGEYKRKRRQSVGDFVSGALNKFKPNRTPSITPQEERIAQLSESPVILTPNAKRTLPVDSSHGFSSKKRKSIKHNFNFELLPSNLFNSSSTPVSGVPRRSKRIAGKKVCRVESGKAGCFSPKISHKEKVRRSLRLKFNLGKNGREVNGCSGVNRYESVGWRLANQQSLKNRIESVKTGLLFSPDVDEKLPKKGTFTYYC

SEQ ID NO: 33118 - protein, 2356 aa, Homo sapiens
LSRRFAAAEKFSSKMDGVSSEANEENDNIERPVRRRHSSILKPPRSPLQDLRGGNERVQESNALRNKKNSRRVSFADTIKVFQTESHMKIVRKSEMEGCSAMVPSQLQLLPPGFKRFSCLSLPETETGENLLLIQNKKLEDNYCEITGMNTLLSAPIHTQMQQKEFSIIEHTRERKHANDQTVIFSDENQMDLTSSHTVMITKGLLDNPISEKSTKIDTTSFLANLKLHTEDSRMKKEVNFSVDQNTSSENKIDFNDFIKRLKTGKCSAFPDVPDKENFEIPIYSKEPNSASSTHQMHVSLKEDENNSNITRLFREKDDGMNFTQCHTANIQTLIPTSSETNSRESKGNDITIYGNDFMDLTFNHTLQILPATGNFSEIENQTQNAMDVTTGYGTKASGNKTVFKSKQNTAFQDLSINSADKIHITRSHIMGAETHIVSQTCNQDARILAMTPESIYSNPSIQGCKTVFYSSCNDAMEMTKCLSNMREEKNLLKHDSNYAKMYCNPDAMSSLTEKTIYSGEENMDITKSHTVAIDNQIFKQDQSNVQIAAAPTPEKEMMLQNLMTTSEDGKMNVNCNSVPHVSKERIQQSLSNPLSISLTDRKTELLSGENMDLTESHTSNLGSQVPLAAYNLAPESTSESHSQSKSSSDECEEITKSRNEPFQRSDIIAKNSLTDTWNKDKDWVLKILPYLDKDSPQSADCNQEIATSHNIVYCGGVLDKQITNRNTVSWEQSLFSTTKPLFSSGQFSMKNHDTAISSHTVKSVLGQNSKLAEPLRKSLSNPTPDYCHDKMIICSEEEQNMDLTKSHTVVIGFGPSELQELGKTNLEHTTGQLTTMNRQIAVKVEKCGKSPIEKSGVLKSNCIMDVLEDESVQKPKFPKEKQNVKIWGRKSVGGPKIDKTIVFSEDDKNDMDITKSYTIEINHRPLLEKRDCHLVPLAGTSETILYTCRQDDMEITRSHTTALECKTVSPDEITTRPMDKTVVFVDNHVELEMTESHTVFIDYQEKERTDRPNFELSQRKSLGTPTVICTPTEESVFFPGNGESDRLVANDSQLTPLEEWSNNRGPVEVADNMELSKSATCKNIKDVQSPGFLNEPLSSKSQRRKSLKLKNDKTIVFSENHKNDMDITQSCMVEIDNESALEDKEDFHLAGASKTILYSCGQDDMEITRSHTTALECKTLLPNEIAIRPMDKTVLFTDNYSDLEVTDSHTVFIDCQATEKILEENPKFGIGKGKNLGVSFPKDNSCVQEIAEKQALAVGNKIVLHTEQKQQLFAATNRTTNEIIKFHSAAMDEKVIGKVVDQACTLEKAQVESCQLNNRDRRNVDFTSSHATAVCGSSDNYSCLPNVISCTDNLEGSAMLLCDKDEEKANYCPVQNDLAYANDFASEYYLESEGQPLSAPCPLLEKEEVIQTSTKGQLDCVITLHKDQDLIKDPRNLLANQTLVYSQDLGEMTKLNSKRVSFKLPKDQMKVYVDDIYVIPQPHFSTDQPPLPKKGQSSINKEEVILSKAGNKSLNIIENSSAPICENKPKILNSEEWFAAACKKELKENIQTTNYNTALDFHSNSDVTKQVIQTHVNAGEAPDPVITSNVPCFHSIKPNLNNLNGKTGEFLAFQTVHLPPLPEQLLELGNKAHNDMHIVQATEIHNINIISSNAKDSRDEENKKSHNGAETTSLPPKTVFKDKVRRCSLGIFLPRLPNKRNCSVTGIDDLEQIPADTTDINHLETQPVSSKDSGIGSVAGKLNLSPSQYINEENLPVYPDEINSSDSINIETEEKALIETYQKEISPYENKMGKTCNSQKRTWVQEEEDIHKEKKIRKNEIKFSDTTQDREIFDHHTEEDIDKSANSVLIKNLSRTPSSCSSSLDSIKADGTSLDFSTYRSSQMESQFLRDTICEESLREKLQDGRITIREFFILLQVHILIQKPRQSNLPGNFTVNTPPTPEDLMLSQYVYRPKIQIYREDCEARRQKIEELKLSASNQDKLLVDINKNLWEKMRHCSDKELKAFGIYLNKIKSCFTKMTKVFTHQGKVALYGKLVQSAQNEREKLQIKIDEMDKILKKIDNCLTEMETETKNLEDEEKNNPVEEWDSEMRAAEKELEQLKTEEEELQRNLLELEVQKEQTLAQIDFMQKQRNRTEELLDQLSLSEWDVVEWSDDQAVFTFVYDTIQLTITFEESVVGFPFLDKRYRKIVDVNFQSLLDEDQAPPSSLLVHKLIFQYVEEKESWKKTCTTQHQLPKMLEEFSLVVHHCRLLGEEIEYLKRWGPNYNLMNIDINNNELRLLFSSSAAFAKFEITLFLSAYYPSVPLPSTIQNHVGNTSQDDIATILSKVPLENNYLKNVVKQIYQDLFQDCHFYH

SEQ ID NO: 33119 - protein, 59 aa, Homo sapiens
KEMRIRMKVKLLHPLVMRLRYRSATRKKLRDSHLAMSPKQGEGARLSVWTLTHSRIIQR

SEQ ID NO: 33120 - protein, 50 aa, Homo sapiens
TRDGGSFSGGDLRSWSLSAKQDWSYSSSTSSSRKGGCATAAICGWNSGSK

SEQ ID NO: 33121 - protein, 57 aa, Homo sapiens
LWVRGGRILDPEKLFFEERRVADERRDCGGRILAPGFIDVQINGAARGRQGNPGEEL

SEQ ID NO: 33122 - protein, 32 aa, Homo sapiens
LQTARGPTCLPWLSMSLATPWAWATPQPPTPL

SEQ ID NO: 33123 - protein, 211 aa, Homo sapiens
LASYLENVDHFPSSTPPSELPFERGRLAVPSAPSWAEFLSASTSGKMESDFALLTLSDHEQRELYEAARVIQTAFRKYKGRRLKEQQEVAAAVIQRCYRKYKQFALYKKMTQAAILIQSKFRSYYEQKRFQQSRRAAVLIQQHYRSYRRRPGPPHRTSATLPARNKGSFLTKKQDQAARKIMRFLRRCRHRMRELKQNQELEGLPQPGLAT

SEQ ID NO: 33124 - protein, 26 aa, Homo sapiens
ILQMHASRAWQEGTQVSRSGLSWFSY

SEQ ID NO: 33125 - protein, 33 aa, Homo sapiens
VQLSPEPSPAERPPLPVRLCASAPWPASTPWRR

SEQ ID NO: 33126 - protein, 130 aa, Homo sapiens
ISCLCPHVCPQVRFSEKVTVHFLAVWAGPAQAARQGPWEQLARDRSRFARRITQAQEELSPCLTPAARARAWARLRNPPLAPIPALTQTLPSSSVPSSPVQTTPLSQAVATPSRSSAAAAAALDLSGRRG

SEQ ID NO: 33127 - protein, 93 aa, Homo sapiens
LAASGLRSIRFALEVPGLRSVVANDASTRAVDLIRRNVQLNDVAHLVQPSQADARMLMYQHQRVSERFDVIDLDPYGSPATFLDAAVQAGCCV

SEQ ID NO: 33128 - protein, 44 aa, Homo sapiens
VESWPFASTGGKLAIATAGTGTQAAPRPFLIRPPDSWALALALM

SEQ ID NO: 33129 - protein, 36 aa, Homo sapiens
VSGEVRARSSGPGSQKQNNSSEAMKEEEGGCWPWIS

SEQ ID NO: 33130 - protein, 95 aa, Homo sapiens
VPAFVGCPAPGPPASLLPAPPRWRCPSRSPRQARLSVQQACAVAPSVRATSRASCWDLMASWGPRCGRPLPRRSPPSPRPCTTSPGSAAKPQRVR

SEQ ID NO: 33131 - protein, 14 aa, Homo sapiens
LSAITDVSMSLSNA

SEQ ID NO: 33132 - protein, 11 aa, Homo sapiens
MLIVIGVFASN

SEQ ID NO: 33133 - protein, 9 aa, Homo sapiens
MEQIAAVGG

SEQ ID NO: 33134 - protein, 88 aa, Homo sapiens
TWMLCVRARSFRPCSSVTTCNIRWFQFLGGKNLKLHFLSIKNRSNYSLNKMMTLKFPPMKTSSGMKRRMKSIQEMTVMGQSLLRSAHG

SEQ ID NO: 33135 - protein, 192 aa, Homo sapiens
LWPEAQIRNTMALLTAETFRLQFNNKRRLRRPYYPRKALLCYQLTPQNGSTPTRGYFENKKKCHAEICFINEIKSMGLDETQCYQVTCYLTWSPCSSCAWELVDFIKAHDHLNLGIFASRLYYHWCKPQQKGLRLLCGSQVPVEVMGFPEFADCWENFVDHEKPLSFNPYKMLEELDKNSRAIKRRLERIKS

SEQ ID NO: 33136 - protein, 48 aa, Homo sapiens
MLVSAFGLCRLSSCRAPRGVRTRRSARWALSSPAAFEVSAALGLCGGE

SEQ ID NO: 33137 - protein, 39 aa, Homo sapiens
MWCLVIAVSVALPCFPGWVFASHHGAQGQSGHEREEADI

SEQ ID NO: 33138 - protein, 98 aa, Homo sapiens
MRRWQTSYYLGAPAASAGSHGSPWQPSRSAWQRSKPAAQPPCRRAERGCPRRRLPGPSWTCRPPKSCQISMAIHPKSSSESPWRTWTPSIAPKRLSSY

SEQ ID NO: 33139 - protein, 179 aa, Homo sapiens
MVPRTIPGVQETKYLLTGPGAVAHASSQSTGITGGSHRARPGPVHFIDKVTDKPSHSHPFALKENWNLNPEPSSPPSPLFLEAPSRQASQHHGASPGAGTSAGCPFEKCCSTEPCLSGLGDVGRGEAASLRARPGSGASRGQGPGSRVSCRRDLGKPLHAPAGFSAGEVHTTPLGNLGA

SEQ ID NO: 33140 - protein, 100 aa, Homo sapiens
MNVKGKVILSMLVVSTVIIVFWEFINSTEGSFLWIYHSKNPEVDDSSAQKGWWFLSWFNNGIHNYQQGEEDIDKEKGREETKGRKMTQQSFGYGTGLIQT

SEQ ID NO: 33141 - protein, 74 aa, Homo sapiens [sequence omitted]

SEQ ID NO: 33142 - protein, 47 aa, Homo sapiens
MEFFIPTSVDLKILPLSACLGSAVSSLPWFSDDACNNAMRFAHSWRK

SEQ ID NO: 33143 - protein, 91 aa, Homo sapiens
MEFFIPTSVDLKILPLSACLGSAVSSLPWFSDDACNNAMRFAHSWAEKPSEKDPDSVVCAVTFGSVFSASESLRLPSCCSVGTPRTRAGQG

SEQ ID NO: 33144 - protein, 61 aa, Homo sapiens
MPQARRSSGSLSPAVGSVSTPIPSPEPKFGGNVSSGQDTPGQPHPPHHRLQTGAAATELKP

SEQ ID NO: 33145 - protein, 80 aa, Homo sapiens
MQWPEVPALPLLSSLCMAMVRKSSALGKEVGRRVKEMVMLVAPFRQSSSLSRTFSSRKVVKAHASLHGARLSPLSRNIRG

SEQ ID NO: 33146 - protein, 54 aa, Homo sapiens
MRVMVTSCDCRESLGYHGGKRLDKLFEKQACELLWRNNSLSLIWSLSKEKQRGP

SEQ ID NO: 33147 - protein, 37 aa, Homo sapiens
MKLTIPVFLFKSLQFIMELLYWLLEGGDSEDKEVKPV

SEQ ID NO: 33148 - protein, 44 aa, Homo sapiens
MASLNIHFSVVYARNGVAGIKVAESSSTLVAETNDADLPQKLHF

SEQ ID NO: 33149 - protein, 30 aa, Homo sapiens
MDLCFYLEIMATSRTFSVHIQREKPQEEIP

SEQ ID NO: 33150 - protein, 27 aa, Homo sapiens
MTRSLLLPGICEQLPGSGQDPFLLLIG

SEQ ID NO: 33151 - protein, 134 aa, Homo sapiens
MGVFTMQGQGIPCCSTIRFGTPPPPRPHQRASAMPRRGPQQTRQDPPVGPKAGGRAAPPNSQDACSTPHAPLSASGEHPATPRHTHPGYIPPSHAWSGALEMSEIQAFPKESGLEGGLPPFAELHMTTADDRPH

SEQ ID NO: 33152 - protein, 19 aa, Homo sapiens
MLLCLCIWSLFGATVDRHL

SEQ ID NO: 33153 - protein, 65 aa, Homo sapiens
MRARALASTSLLLLSRLEPPLADSGERECASHPPRPAAGPSASGNVSGAACTLLRPWTHHMMVLR

SEQ ID NO: 33154 - protein, 32 aa, Homo sapiens
LRYFIFLAFLEITTSCGSVSGNFTDLSPPSHK

SEQ ID NO: 33155 - protein, 149 aa, Homo sapiens
MCCLCVLWVLGVTFSLGDGIQNSSAGAPLLHLLPGSYWASSSSSLYLYSTGSRESPADGFCPGLKQPESYGKGRAWLARGIFQVLKRQAYGACDPSRRTKWDLKIHSTSAHGGPGPAPARGHTADWAAGMPGLCWRPLWLAFTSVCLQE

SEQ ID NO: 33156 - protein, 46 aa, Homo sapiens
LRTVLAVAAAAPVSRWARTQPLGAVAFPASQRQKRGSGTQKVGLRL

SEQ ID NO: 33157 - protein, 13 aa, Homo sapiens
LVVGGYLFVLIGR

SEQ ID NO: 33158 - protein, 174 aa, Homo sapiens
MTLSPLRAWPGRKPWSWRLLWAPLPSLGLPAPPRRMGPLSGPAVAFLALRAPTQPRLAPCLHPPHRLPPWAGPGHHSRGPQCHHHLQSASARRWGCCSSLGTPRPSRSPRRMTPTSGWPTSLGQMPTVAKWPGTTSPASSSVTSHCCSTSGQPQRAQGCCSPSRTRRRPWSCWA

SEQ ID NO: 33159 - protein, 64 aa, Homo sapiens
VPAAALAFAAAAAAPGSAAATPSGLSHGVSTGAGRPAVLLGPARVLDWWGAAWGQGGAAKGEAI

SEQ ID NO: 33160 - protein, 93 aa, Homo sapiens
LPPGATLCQAPEGGWLGRELRGFPGAGMSAAGLSSPCPTFLFSSLVSPTLLLPQAVPDAEFRLSRLFLVPGKAERRSSNGLVLRASGENQRSN

SEQ ID NO: 33161 - protein, 41 aa, Homo sapiens
VSMWKKRSSFTYLFLFVSLPGHSLFQRLNSLCNGVWVHLSL

SEQ ID NO: 33162 - protein, 187 aa, Homo sapiens
LKREDTRKQVKIILLLFCIQQASYYGTAVMGQAYLPELGTQEVSPKVLQGPQQAWTEEVWTAWPCPEPLCIITAVPNLHPTLSLPIPGPGALLLCSRDSWSSLRQHTVLLWRRPSPTHAGMLQPVPEQVVAGGCWQRRDNGPAPGGKCWLQGTESSPCHSPCYPLGNLKGISKNSGSATLLSFLWNM

SEQ ID NO: 33163 - protein, 38 aa, Homo sapiens
LILLQMASILLLEVRTADGDKGTKVYVFRISNPGTHHF

SEQ ID NO: 33164 - protein, 76 aa, Homo sapiens
VAGIRREAVQQAEVLGRPPAKPPVDAFDFLSLFLVPSGAFPILVLRSSRSELVRRGWELVPAEIQWEEPAAARASP

SEQ ID NO: 33165 - protein, 95 aa, Homo sapiens
VPGQRLLDRYGHTQPLCVIQAKPPSTYMSCSTTTLSRSSLCLAAALSPRWWLRLLGCGTSLCFPMAPAHQPCQTGSVSPLSSERTHQPHSTTLPA

SEQ ID NO: 33166 - protein, 133 aa, Homo sapiens
LGLFVSAVLRLSSVSLGPSLPRRALAGRLVARGGGGLGAGRDERRLHELRERRAGGGARLQLPAAGGRGGRCLLLRLPRPQVLLRRPAQLLPLRAQLHVVAQHWRSHRPVRSSSGSSRLHCYRLCALLPVHQL

SEQ ID NO: 33167 - protein, 55 aa, Homo sapiens
LVLLWLPVLVRDLCPALQPSPHSLLIPLPPLLTSCSPWSRWFSRGAPAPLPRPQS

SEQ ID NO: 33168 - protein, 39 aa, Homo sapiens
LVCVAFSMGLCWMRVLLTQVYTSISGQQKRRMTQAWCIK

SEQ ID NO: 33169 - protein, 67 aa, Homo sapiens
MCHKGWHGPGVPHHVAFTPCKARLRPATQCQAHSSPRRKMVQAGSIPLAAASGRLCLTHAGWWRGAS

SEQ ID NO: 33170 - protein, 24 aa, Homo sapiens
VSSLLALQALPLPLGLDGGYLKVK

SEQ ID NO: 33171 - protein, 68 aa, Homo sapiens
LCPPLGPKTSILLLGSLAQGQGAQRAASARNANSCSQRRLRSQLCQLLRTHFDQRSNRDLWVGVLWRS

SEQ ID NO: 33172 - protein, 195 aa, Homo sapiens
VRLGGPGWRRGGRFGPLAAPGALSVGGEAAAAAATCPDFSVPGSACSESAAEPEGPTDVRALCGSQMAQGGALTAARLPGAAGPGAGLAGLRVRARGTVRAGLPAAAALRAGRGPPRHAAAPGGGTRGERAHQPGRGLAGPDRSQWRPGLDQGCSQLLENLDGLRVPSAAIAEPLSIHGTLKLHLAYLLDLLGQS

SEQ ID NO: 33173 - protein, 80 aa, Homo sapiens
MSALHPLCTHSPGCCCLFFFLEGGVLFVYFSNFFLLEDQDRPKIHDQNVFALDFALEEAAILAAKPPGWKRGAPSGAPAG

SEQ ID NO: 33174 - protein, 47 aa, Homo sapiens
VLGGAAASRAERHRSMIPLSKDPFTIGAARISYAVCSCSWPLWATWL

SEQ ID NO: 33175 - protein, 169 aa, Homo sapiens
MVSGRRPQPIHFASLPLPLPRAASSAALQFRRRLPHPALPFQGRRITRPRTRLANWAFLRAGLEQVARLRVRVGKSLNRQPCCPVGFLCLWRERESGQTSKPNSSIPEALMQLWWRPLSFLCQCLVILQRDAALHRDAHAVSHTSLHHLDCPALCILKPTACRSRHFSI

SEQ ID NO: 33176 - protein, 36 aa, Homo sapiens
VYRAALLAAIRPQVGALAHLSRAGAAGPWDSALSPA

SEQ ID NO: 33177 - protein, 109 aa, Homo sapiens
LRSFLVVVQWLMQVPLTPLWELGLGRVVENADALAIAIVLNNQWSLVPNRGILYFLPVSMKLGGDRVSCQFLTATSHQWLHSVSLTQHMAQECLPSVSVSTAAIPRCWS

SEQ ID NO: 33178 - protein, 73 aa, Homo sapiens
LRGHGQHELQHLTHVVAGVIPSLVHAHCILRGGERLDHLREDHCAPEASQGGVPGRRRRTDSGPSGERKELVD

SEQ ID NO: 33179 - protein, 143 aa, Homo sapiens
LRTRGGKARAFCCVTSRRPASPPLVCTHARSFSVLAPLFLHFPLLPDRRSRSFRAVHSGARGRARRCRRRLREARRGRDRREKAESPPERSRLPSSSRRQRGPPTSSPVPLPRSQCSLLLQSGTIEGTMSSLNFVLKTVRMLM

SEQ ID NO: 33180 - protein, 120 aa, Homo sapiens
LGGRPGRRLSGAALNVTGKWFGRPRLTTPGRTDGRRRREPVAEPGDLENERVRLSVGHSVGPLNEVPAPLSPEPGAFPARWTVSPAVSMIVFLLQVLLMFKIACQLLSHEFSNKKMKSLC

SEQ ID NO: 33181 - protein, 117 aa, Homo sapiens
LGLWKPRRPDFVSCISKHGDLGEGEEQFFLLFWEGLCLVVPVPLGRLERRGTTGESSRTSGEKKKQRLILEGLLSLPALGAHGISCCPALLPASLPPPPPPQPVCTGLSPVYCRGAH

SEQ ID NO: 33182 - protein, 68 aa, Homo sapiens
VGTHFKIPATLGYRSCTLFLQLDFLYFIDIIAYLYEGDPKVQCSREWVFIFIALFRLLVMYDPVWSSC

SEQ ID NO: 33183 - protein, 13 aa, Homo sapiens
LFVHLIRLLFWKI

SEQ ID NO: 33184 - protein, 35 aa, Homo sapiens
LALALPLVLIGVVSHKEALLPAWLPPLTLPPGSVL

SEQ ID NO: 33185 - protein, 53 aa, Homo sapiens
LAKFVILRNSAVLSSTASFCLPCSFPDVIQVAEFRCPCFGSLSLCLSFFPCSR

SEQ ID NO: 33186 - protein, 61 aa, Homo sapiens
LGRPGWMSQELPAAGHTTAFICALGPGLLLSLPSIGAQHPLPAHPSDSNSSPAPRPCVHFS

SEQ ID NO: 33187 - protein, 19 aa, Homo sapiens
MYYLNLLLMCNNTLALELL

SEQ ID NO: 33188 - protein, 72 aa, Homo sapiens
LHPGAARRRRAPLPPPPPPGLPGSRGPGPLHLSFPAGHKAFCCRRGDWRPSLLIPLIFQFILCLFSGQSVTL

SEQ ID NO: 33189 - protein, 31 aa, Homo sapiens
LAPGRAARGGGVTAVLRYVRLFFFFRFFLFF

SEQ ID NO: 33190 - protein, 96 aa, Homo sapiens
VGSQQDQMPLSSLALLQMFIWCDCIMPSESTVCCPGWPRTLGSSDSSASASQVAGTTDAITTTLGSVPVQQKPLGLFDLFKCPLWKVCEWPCKKTL

SEQ ID NO: 33191 - protein, 92 aa, Homo sapiens
VWAGTSGRQLLHFNSPFNVFNFLHRKHAVPSYYKPNCVCFGYSYSWLCSFSCLLHIYDIIYFSQKEKKQWPLVILLLFCLHHHVFHHFNQSF

SEQ ID NO: 33192 - protein, 24 aa, Homo sapiens
LHRVAWSCLSVLPATCLSSHPSTD

SEQ ID NO: 33193 - protein, 64 aa, Homo sapiens
VLSSLPITFYPLSLSSVSFWFSLSHSHSLPSSHILSVWVFLSLYVSLAQSLSLFIDPSLTLDLS

SEQ ID NO: 33194 - protein, 82 aa, Homo sapiens
LRGSPLGSSRHNFLIWKEQQNLLERLWVLHLCLQCVLLILLALFRTTAIIFLELQGQWHMKWATTLECFMTTILASVLLQYV

SEQ ID NO: 33195 - protein, 84 aa, Homo sapiens
LSPARPGSGRWLQLSFLALLCSVRAALELCSPGRSPSTSSAAEEPSASAPAPLSSAAPIPGSSLRGVELFPMTVLIRLHYTFVC

SEQ ID NO: 33196 - protein, 22 aa, Homo sapiens
LPWHRIILSFMTLWSQWTLKDF

SEQ ID NO: 33197 - protein, 101 aa, Homo sapiens
LGAGSESSGWERLHHLGAAWGSSLSVFLLMQSARSRVSAARGPVCNPARHVYSPPPRALPQVLLQPGPRSAAADPVHTARGYDPWDLPSAQLELPSWPTEQ

SEQ ID NO: 33198 - protein, 27 aa, Homo sapiens
LWFIIFPVFLGQMAHNTEQASGWPLPG

SEQ ID NO: 33199 - protein, 12 aa, Homo sapiens
MPFSFLATAVGL

SEQ ID NO: 33200 - protein, 21 aa, Homo sapiens
VRVPGVGVFVLLLVSVRSPAV

SEQ ID NO: 33201 - protein, 112 aa, Homo sapiens
LEAGDGRIAGDFFFFKQGLTLLPRLECNGAITAHCSLNLLGSSNPPTSASWVASTMACATMPYFFFLKTGSCYIAQAGLELGSSDPHALASQSAGIIGMSHCAWPGFFFFFF

SEQ ID NO: 33202 - protein, 15 aa, Homo sapiens
LIDFLVLCLEVFAYL

SEQ ID NO: 33203 - protein, 18 aa, Homo sapiens
LPRTFWTRKLMKFLLLQM

SEQ ID NO: 33204 - protein, 57 aa, Homo sapiens
MVAATTCVPSGMGLLLPPEASCSNIDGPACQRVPLPSKNECLRSVLLWPQFSSFGTT

SEQ ID NO: 33205 - protein, 39 aa, Homo sapiens
LPERCWTLLLTLVLYPGSSCRYQTGTTRGHSRCCKPAPH

SEQ ID NO: 33206 - protein, 86 aa, Homo sapiens
VPASFAAASAVLSAGASILPEHGECCSPLPILIPSPPGLSAESRQISVVLCPKLPQDDGSWGQASPSGIVHCSSTLPTDQRNPSGQ

SEQ ID NO: 33207 - protein, 47 aa, Homo sapiens
LNILRTGIFVSALLMYPQQPELPDMSVIAALLIILPTADPFCETPGC

SEQ ID NO: 33208 - protein, 20 aa, Homo sapiens
LGLRLAFLLLSLQMNYCGIL

SEQ ID NO: 33209 - protein, 34 aa, Homo sapiens
LGMGCWQGSKSLFLLISYSTNTSSDDFPKLMRMR

SEQ ID NO: 33210 - protein, 78 aa, Homo sapiens
LTSAPSPNPQMLHFFGIPGLSMGGRDAWPKHLEQGTPYPLVATSPLLWPPEISLSAVAPSTALMGLFSHLLLVSRGNF

SEQ ID NO: 33211 - protein, 118 aa, Homo sapiens
LAFATIRFHLRFSAPIPSHGFLIPFSQAMVWSLGPSWFAISLACIPFESKELLGEGREAKGGPNPRWCPRRHCVRFAPFFQWVLLILEASASMRGGARRPLVLVFAEGGALLTFLVLS

SEQ ID NO: 33212 - protein, 29 aa, Homo sapiens
MIALLCSPLWGVSPLLGRSGAPASPGCIS

SEQ ID NO: 33213 - protein, 8 aa, Homo sapiens
LFGFLLFS

SEQ ID NO: 33214 - protein, 59 aa, Homo sapiens
LESLSPCSPLPWHSCMHFKGSLWGLGFLPLPGLGPAPNPASPAPAHPHIGALLLLWCLK

SEQ ID NO: 33215 - protein, 22 aa, Homo sapiens
LVILWILFFVILKRQMRACINH

SEQ ID NO: 33216 - protein, 98 aa, Homo sapiens
VEEVCQAHVLSVLLLLFLLQHHPDPRLVLPPPGGGGHPAPLGPDAQDGVAAAPREDVCAHLGHVHLCERGHCHLPAETLGSAVHPLGCLVPLCLPWPR

SEQ ID NO: 33217 - protein, 20 aa, Homo sapiens
VWRRRGWTSHIAMWWCVMGS

SEQ ID NO: 33218 - protein, 115 aa, Homo sapiens
MPLFFLILDIFLFPFNSWFLPKRSHVRTSLGMCLQEKCGLPSSPWMPVGSLPHPGCLWAAFLTLDACGLPSSPWMPVGSLPHPGCLWAAFLTLDACGQPSSPWMPVGSLPHPGCL

SEQ ID NO: 33219 - protein, 19 aa, Homo sapiens
MEVLLRKTLSSEVKRDEDA

SEQ ID NO: 33220 - protein, 58 aa, Homo sapiens
LSPCLDDFLRLFYPSPSPRYLALFSLPAPSRVHPPGLLPLIAWFSLQSPAAVVGRWVR

SEQ ID NO: 33221 - protein, 62 aa, Homo sapiens
LYHFLRCLPRNMVTQSKQTRKCMPLAFVISSLPSSTVLLLVQLLQRHWLKNQQAAILSFLVW

SEQ ID NO: 33222 - protein, 65 aa, Homo sapiens
MFCFVRVAGILGIWKLSCTYWSKIYVCSRNVCLRRSYNSLWCIGPSSRWASIYCYVFSSESNGCS

SEQ ID NO: 33223 - protein, 41 aa, Homo sapiens
MIINCAGIQWNMMALRLFAFLQIRFGSPTLFSITMLLVTSK

SEQ ID NO: 33224 - protein, 80 aa, Homo sapiens
MLVAPCSGEGLRHPQRRSGQDQGVLGFFLSLPQHIACSQGSSFVSLLLLPGLWSGHHHLLPTLSTASSLSPRLHAILFHM

SEQ ID NO: 33225 - protein, 268 aa, Homo sapiens
VLLSFPRLTLFCNFLFMSLEATKWWEIRDSNIWWPCDVSKLLDFSQFPFPIKWVVLGIRGSNSAGNRGRNRQLRPRTSPKPRAATGTTVRGASVKRTGGPAPAQPSPPGPLPPTPHGPHARAETGASPGSPVRQPLPGPAPQREAAWGRRRVERAAEDKEEVAVENKKELSAVCPDAGRRWGQARPDLHAIPAGVPACLREGKDPGRLLPKVRLLPKVRLLPRGPHKARQTLQPDPDAPPSRMHMRGTLPETHLPERPGSTRANWRAD

SEQ ID NO: 33226 - protein, 85 aa, Homo sapiens
LRSECVLYFTEKRRERECISLSPRSLRGGGTVHAHLAHPVNVCSSPPLHTLSGLLLPFFFLGGGGAFCVFFKFFSVGRSRPAKNP

SEQ ID NO: 33227 - protein, 52 aa, Homo sapiens
LGKRTRAPSWGTGSFAFYFFSCSQGAHVFETDRISSSMWRQVDFSRLAGISF

SEQ ID NO: 33228 - protein, 38 aa, Homo sapiens
LPCSLSTTPSSTDQRTRSSMLTMPVSTSFSLAVTTWFC

SEQ ID NO: 33229 - protein, 86 aa, Homo sapiens
LIFFSYWSLRLWLLQGHHELGLLVSSFPCLVSFSQFSQKPCPGPCSSPSPQPLTPATSGRMGSSSHSPRSQSPPWMGLQPELSMRP

SEQ ID NO: 33230 - protein, 87 aa, Homo sapiens
LIFFSYCRSLRLWLLQGHHELGLLVSSFPCLVSFSQFSQKPCPGPCSSPSPQPLTPATSGRMGSSSHSPRSQSPPWMGLQPELSMRP

SEQ ID NO: 33231 - protein, 142 aa, Homo sapiens
LRKSTLWGPTPCDVCLVACSLFYLQSTVPIRAARSASCLIWKTTTLGSQRNDGSLGVSKIGSEWPHGDGGPVSGSLGPPEMVLHISILKTGEVRPQTSQAFSFHWKLDIFPPGFLGKPNGAQKAVWTSVWVLSWSSDVYCYF

SEQ ID NO: 33232 - protein, 78 aa, Homo sapiens
MCFLNPPTPNLSPLCLSLLLAVFLFSFSSALVSWTPLLCPFFLFITQSAVIVISMASSLHSSSCFQPPKPEHCLASNH

SEQ ID NO: 33233 - protein, 17 aa, Homo sapiens
VQFLKSPVVYMMMIMLL

SEQ ID NO: 33234 - protein, 76 aa, Homo sapiens
MTVCLYLTVLLTNNLLGSKGQHLLSKAQEEFEVNGFAIVTINGCYIKFSVIFVCDSTVVWVNVHRHNWLNPKSLIS

SEQ ID NO: 33235 - protein, 66 aa, Homo sapiens
LGRAGSARGLLCISLHFSDVWSSPGPGRSGVRAGAGGVGLGVGAAFPAAGEPFASELDPGDITALG

SEQ ID NO: 33236 - protein, 110 aa, Homo sapiens
LAPLIPRGSAGSAWAPAPPLRFVRWAHCFWEGRADMVAAAAPSSALACRGRLAATRLAGPERQPRGGDGVAPRQRRFCGRLEVGSGREKEEGRRGWASASGAAVPFVSAA

SEQ ID NO: 33237 - protein, 19 aa, Homo sapiens
LPGTLHLKSLCLCCVLLSA

SEQ ID NO: 33238 - protein, 152 aa, Homo sapiens
MAVQAAILSGDKSENVQDLLLLDVTPLSLGIETASGVMTILINCNTTIPTKQTQTFITYSDNQPGVLIQVYEGERAMSKDNNLLGKFEFTGIPPEPQGVPQIEVTFDIDANGILSVSAVDKSTGKENKITITNNKGHLSKEDIERMVQEAEN

SEQ ID NO: 33239 - protein, 16 aa, Homo sapiens
VWFPIRKLFFLLGFHL

SEQ ID NO: 33240 - protein, 20 aa, Homo sapiens
MFWSCIMCHCLLALSSLLLL

SEQ ID NO: 33241 - protein, 97 aa, Homo sapiens
MGERAGQFLANKRWLTALTSAVNSAHLASGATPASAVTSTTVATGWRSLVGTTNTSMSAVAKISSTSTTCSGLPPSSTLLACSWASSLPLSLEALRT

SEQ ID NO: 33242 - protein, 86 aa, Homo sapiens
LRRLTALTSAVNSAHLASGATPASAVTSTTVATGWRSLVGTTNTSMSAVAKISSTSTTCSGLPPSSTLLACSWASSLPLSLEALRT

SEQ ID NO: 33243 - protein, 66 aa, Homo sapiens
LGSGALVPASAAAAAGSQWPGVLGSHRPAASIAPNLRGAAAGALGRRGSAKAADAIFLPRRSQGNR

SEQ ID NO: 33244 - protein, 36 aa, Homo sapiens
LENWKQGKRWRIWSLFLSWKMFWGPATSDILCSPRL

SEQ ID NO: 33245 - protein, 28 aa, Homo sapiens
LPGVYSVSLAFSLILMDIVWARGRDGWL

SEQ ID NO: 33246 - protein, 63 aa, Homo sapiens
MRVPQLGSATSCGVALAPGAAATSPPAQPPGCSSPTRLGCLCCTLSHSGWNPGPGTRQRSLLR

SEQ ID NO: 33247 - protein, 40 aa, Homo sapiens
MTQLLSRVSGLPSASAGSARAQSASAPPTDPGKVSGLPQS

SEQ ID NO: 33248 - protein, 51 aa, Homo sapiens
VDLLPHQAHPVHRVPDDHAAGWLQWTTCLVLSGSGFGGSLSVVEPVTEAVL

SEQ ID NO: 33249 - protein, 13 aa, Homo sapiens
MRYVFILIACVLQ

SEQ ID NO: 33250 - protein, 96 aa, Homo sapiens
VHRSQKALLVFRRTLSNLLYMPLLRGLLWLQVLCAGPLHTEAVVLLVPSDDGRAFLLRSRLLHPEAHVPPAADRGASLQCVLHQAAPKSRPRPYTP

SEQ ID NO: 33251 - protein, 177 aa, Homo sapiens
LEPRDEKIKMPLLRGLLWLQVLCAGPLHTEAVVLLVPSDDGRAFLLRSRLLHPEAHVPPAADRGASLQCVLHQAAPKSRPRSPAAGAALLHRPRRTGDEPCREFHGNGFPGPTQLTPGECGLPAPSSLLQHASAPVRTGSEGQVVGCPRARGETGEGLSLAFLSSLMFTSRNGLVGC

SEQ ID NO: 33252 - protein, 208 aa, Homo sapiens
MGACATPATAAAPVAWAGRGGTASWPVPLGATEPPAIWSAPATTTARVSLPRAPAAAAPASMARPASTPVPLASTGLAARGCAGVNMEPPATPSVADASALPASTATSVRGGVSQVHLERAATSAVTVTGGHPVTLSPVSAFAHQGAQEPPVTWIAEGASLGPAAPCTVTAGVGLTATLSVGSVTVWMATWGPRAGKVGPSGSPRTRP

SEQ ID NO: 33253 - protein, 109 aa, Homo sapiens
MRPSEGCLIAPALLTTLSQPLPSPHPQGLTAPHPLQAGTQLGISPAVTDFVQAKDLAGPDAVPSPRPGMGVGVPELMWCPLSLSEWLRLIPLTYLQSPSTQGRPDVATG

SEQ ID NO: 33254 - protein, 25 aa, Homo sapiens
LCWGTAAVVAAAIAQTAGSACRSPA

SEQ ID NO: 33255 - protein, 62 aa, Homo sapiens
LARGGERATPPGPLKGRGFFFFFKAILEVFSCGRSAPLLLLSPLSPTPSGLILFKIFSPILR

SEQ ID NO: 33256 - protein, 31 aa, Homo sapiens
VRSLHVAILPLLKALNGPVANDLLSRQERGE

SEQ ID NO: 33257 - protein, 34 aa, Homo sapiens
VIATIMDVDRCRGILQPNWISICICFLIPSSLAE

SEQ ID NO: 33258 - protein, 78 aa, Homo sapiens
LSSGWAEPLNLFYLVLSSLFLAPQASSHEENFTPSTAGAKRCPKDMATWVHSSDRPLTRAGLWRLSCMGPSNTKPVSL

SEQ ID NO: 33259 - protein, 56 aa, Homo sapiens
LPAAGFHLARACCFLRARPLPPVLLFVPFCFPHSLPQLIARHLGPCPHSPSTLQGT

SEQ ID NO: 33260 - protein, 40 aa, Homo sapiens
LGLQVIIRFEIFKVDTKLFQQCRQLSVLLWAMVLLVKHVS

SEQ ID NO: 33261 - protein, 160 aa, Homo sapiens
LRLTLLLPAARHLRGGPPTRPRATRFKKKKKAALSPLLPFPASARTPSLPPAPPAQAPLPWKPSGFARISPPPPLAILQYRGKADHGESGQQLAAAPGDGRLPLLEAVRRLRGQDCGPLSALCHGQLLAQPVPQVLLLPGAAGRHRHVLLHQKWHDPLQK

SEQ ID NO: 33262 - protein, 65 aa, Homo sapiens
LRATLWGPAPWFLLLPLPPPDPSGPACSAPTGLQPASHRTFGGPRLERSAGVGAPRPQTLQKEQQ

SEQ ID NO: 33263 - protein, 27 aa, Homo sapiens
VMPNPVLCTQVTLWLCPLLMPALQQLS

SEQ ID NO: 33264 - protein, 81 aa, Homo sapiens
LDFTLHFSLELFLVINFLGGTGTRGPAARPRIAAAGQRGLGRAPRRSGAAQAVMVTRDLKDRVAMYHPLECPPRNSVKMMT

SEQ ID NO: 33265 - protein, 74 aa, Homo sapiens
MPPGRLLCPLGLQPEACPSALGPDPRPPAACNQTLFASSRHPPSPAPHTVPGSPLPRRSVPLPSPVTFACWSPG

SEQ ID NO: 33266 - protein, 79 aa, Homo sapiens
LRSSLYLERGEPRTRGGGQEAIAPPCLLPHHRWPSPRPTRASQAQPHLLPREDSDPPKAGGGGGGGRGGRSWRSRGLAR

SEQ ID NO: 33267 - protein, 28 aa, Homo sapiens
LAVFHSLCVHAAGGASGPGGAAAEYFWL

SEQ ID NO: 33268 - protein, 132 aa, Homo sapiens
MRAFGRTRSTLRVRTLQPPTACAGVVAWPAAGSRICAALSRCTGVGRSDFKPRQQPMKKQILTANAVRQGPANYSPGAKPRCHFFLQVQLIGHSHVHQATHRPTHLRLQHRAASTAQTPHAAIYGKRWPSLL

SEQ ID NO: 33269 - protein, 71 aa, Homo sapiens
LLCDLRPVCRPLWASVFPAMKTAISQSCVKQKRKAGGRPWANGRALVIINIVAAVVLLLLINIHIIYFILT

SEQ ID NO: 33270 - protein, 58 aa, Homo sapiens
LLSLLVTSVFRVTPLPLPTVPSSLPLGPLLHPICVSLPPVLSCLDPLVHSLPWASSEP

SEQ ID NO: 33271 - protein, 25 aa, Homo sapiens
MRAPCFGSLTCTQARTWTRCWSGRT

SEQ ID NO: 33272 - protein, 52 aa, Homo sapiens
LQLSIFGREHWTRSQKVEFWVLFSHSWALGMFCSVHQMFSACLPLSCHQSHL

SEQ ID NO: 33273 - protein, 58 aa, Homo sapiens
MCKLHQEIPLHSGLPAAGHTQEELCLPIWLLLLPGLLLHMCQEDPGAGLLPWFLWHAV

SEQ ID NO: 33274 - protein, 128 aa, Homo sapiens
VAVFCQVYLLSCSWLRFADLCIHCGLLGTSNWKFFTPAMAGRNFGPQLRLPDSGRYSQSQLPSELGEREKGKYKKTQPCGLTPYSMIQAHSQLCVSRVIMVKRMVTSKDNHRASLLTLVRTRFLSLVL

SEQ ID NO: 33275 - protein, 81 aa, Homo sapiens
LKIQYQMHLRSFLLLLLLHRVLQGKAILWLPVVLWIIFQILVTVKFLHDPVLLAIRLLTQCQSHCTMRGARGILSASWKQT

SEQ ID NO: 33276 - protein, 149 aa, Homo sapiens
VVACRTQPSMWHGWWASICSGCLLSDEGTGCPCPAQHAPCPACPLPCMSPVLHIPCPAGPILSCMSPVLHMPCPALLLHCTPPAQHVSMWAWFWPQHVRAGVGGTVLLLLLTSVPCPCPPALLSPRLTCARPRISSRALPGGCGPRWRP

SEQ ID NO: 33277 - protein, 117 aa, Homo sapiens
MAATPRLWSSTGRSCSFGSALTTLWAVPWPTARSESAWPRWRTTRLPCSTSTSTWSWHIPCATTRSCRGPGPPSAAPTWTSMTTASRGMLCCRHRLPLRRAWLLWMRSWRGHWPRES

SEQ ID NO: 33278 - protein, 72 aa, Homo sapiens
LLLPESPASPSSTSVCALLLPPFPSTAHSSSSRPLSTLSKHITGDLIATRSECVCCHPAWPGQAWHSLGFHA

SEQ ID NO: 33279 - protein, 176 aa, Homo sapiens
LASSPALWAASTTLLTMCTSRAPTCGWPCTRTTCRPPIPTMSTRRATWTRHLVGPCSSCGPTTRSGCRCRRTRPTASTPRSTSTPPFQDSCSAPHNPRGGSCCPGLLPFSGRATFSITKNLLEKKTKAEQRRPWPWPEETNLLSPCMQAEIVSGRGWPEFLSPKCLCSVRAAPHRP

SEQ ID NO: 33280 - protein, 58 aa, Homo sapiens
VSLWAGHPSPDSFSESFLLCCLLHLPLLQGSSLILKCLRPLGQLFSSHQLIHRRQTHD

SEQ ID NO: 33281 - protein, 104 aa, Homo sapiens
LCSSSRPKPQVVGRFLPFLTPWNCIACFTCVHVDSFSWQPRRKPSRSHFTAGILWFTEVTELARGQLNEKIHHRFDGCLTNFTNCCISRSFCRFVFNFRTNTEK

SEQ ID NO: 33282 - protein, 27 aa, Homo sapiens
MCTFLVAVSRPGIFGLQWRWLCSPHLP

SEQ ID NO: 33283 - protein, 92 aa, Homo sapiens
VCGSEPDFISPKASRPEETRWVLSVLAAVGGTGASSPSPVLPARSPESRWSSSRPPTSSQPTFRGERRQAGPSSDQASPEVGTPLCVPLRSR

SEQ ID NO: 33284 - protein, 58 aa, Homo sapiens
MRKAHAWPPPACSLAVVRLRAARRGRQAGIQPGSLETLTHPPSHLGSAYPPALREDEA

SEQ ID NO: 33285 - protein, 39 aa, Homo sapiens
LNLSLVVALTVPYSHRMGCCLLSVLENMGNLVIIQHRMS

SEQ ID NO: 33286 - protein, 52 aa, Homo sapiens
MKWRSPMSIIAMSAAGSNPHNLWVVALQCHRSNHLIFELGVLSFSETMSCVT

SEQ ID NO: 33287 - protein, 120 aa, Homo sapiens
LRGAPARWRRRRRWPSRRAPGTAAATAAASSVWRASCAPASRRATTTRRTRCTGPCSSGTCPRASTRRPGSSCTREPCSSSAMASKTVQQTCPCWSWSPWRRRKWRWLTSCWKIWLKCSA

SEQ ID NO: 33288 - protein, 46 aa, Homo sapiens
MSRFALPALGIPLFPSASAALPFSGAQLWSFHPARQRGEGARAASG

SEQ ID NO: 33289 - protein, 36 aa, Homo sapiens
LLSVASGSSLPLFLLVPINELFSALGKKSPPAIMRI

SEQ ID NO: 33290 - protein, 25 aa, Homo sapiens
LEFWMIACVILTASITSIPTKSSPK

SEQ ID NO: 33291 - protein, 89 aa, Homo sapiens
MRCSGGCTWPDSPSCPVHSHLPVERTLRVPSPGLVTCVCAGAAHEDCLPLRAWAAAAAILVLGNGAAWPSHSLVSCLLSSCPSYLPKVP

SEQ ID NO: 33292 - protein, 48 aa, Homo sapiens
LMVAFVLSNFTENAVVLTSGLSVLLASKCSTVLIPLLLECIVKRLEYD

SEQ ID NO: 33293 - protein, 101 aa, Homo sapiens
LHSGVLLQSLPLSGLWLELFLSQILAPEQCFLFLQLRSLPFSFLLPARSTLLCLHLDYFRNEMQQIFIQQCRELNFWSREPWILVLALPLTVWPWEVLCLL

SEQ ID NO: 33294 - protein, 24 aa, Homo sapiens
REEAQLVMLLLLLLPPPPPLLLIL

SEQ ID NO: 33295 - protein, 43 aa, Homo sapiens
IPSPQLQTSRLIGGEHSFSLLFGMLCCLVVTVPMGELYRKIVM

SEQ ID NO: 33296 - protein, 31 aa, Homo sapiens
INNGARKVEMDAYTWGIVSGRSVCVIKTCST

SEQ ID NO: 33297 - protein, 46 aa, Homo sapiens
LQPERGGALSPVLLSSSASELVSSSRRDSLCQLSREKRNFQLKTLS

SEQ ID NO: 33298 - protein, 28 aa, Homo sapiens
KQGQMRTLRPRETKSFAQEDKGNHQKST

SEQ ID NO: 33299 - protein, 92 aa, Homo sapiens
VASAGRAISAGALLPPPGASAALDVCARRRLSVAPKLLPGSDLVRRLRSRTLARKEPRDSCGQSRVESWAFSLRVFWWFPPWSLTIALREPC

SEQ ID NO: 33300 - protein, 59 aa, Homo sapiens
LAAGLGPLRKSIRAAAAAAAAAAAASAAEEDSAARAPPATSAAESHRHRMPEKHVGTQH

SEQ ID NO: 33301 - protein, 53 aa, Homo sapiens
IQNLRAVLPKTPVCLVKSVGCKQFVLVPGPQLLMKWQESTEAYFEVPGASRGD

SEQ ID NO: 33302 - protein, 33 aa, Homo sapiens
IHWSEMEIEEKLRARRASGESLSFGKAGNLHSW

SEQ ID NO: 33303 - protein, 116 aa, Homo sapiens
LALVLLSQSAPQRWLPGVVSVGRLVFVSPLVSVPFSCPPWLSWIRSAPLPAPLAVPRWGTEWPAPAKKTRLRPSWRSKRARLRASRTTRPSPSWTAAPPGPSRTASRRGVRMLLME

SEQ ID NO: 33304 - protein, 19 aa, Homo sapiens
VRVDMIGRRIVVLFSSLAV

SEQ ID NO: 33305 - protein, 25 aa, Homo sapiens
IPHNTQAFLWGMGTVDLWLLRVPTN

SEQ ID NO: 33306 - protein, 88 aa, Homo sapiens
MSSCGTLTWATSSPAHPTWAPGCGQVCISSCPTWASMRSSRRCLSGCDFRSEAQAVWTRLRWAGSSTSPTLTAWASQRWSWCRWWWTE

SEQ ID NO: 33307 - protein, 36 aa, Homo sapiens
IQVTETKSRKRVSGMFPLKAKWRMKAITKMEGYFQD

SEQ ID NO: 33308 - protein, 9 aa, Homo sapiens
ILSLDLPNT

SEQ ID NO: 33309 - protein, 42 aa, Homo sapiens
IHCLDKSIFSGRVPGSSSSFLLFLLLLHLRLLGDHCPLSAAE

SEQ ID NO: 33310 - protein, 11 aa, Homo sapiens
LAPGNSIKASS

SEQ ID NO: 33311 - protein, 28 aa, Homo sapiens
RTRITPAAARQPAPSVQWDARDSDGRIQ

SEQ ID NO: 33312 - protein, 5 aa, Homo sapiens
IMFGS

SEQ ID NO: 33313 - protein, 68 aa, Homo sapiens
IFKLDVSTVLLFCLESGTRGASACAAGAAGNSGCFSLSLSFLGAHFCCFDSRAYQVRSEGGRRQCPFC

SEQ ID NO: 33314 - protein, 65 aa, Homo sapiens
VVLLLVAVRLHTLLSCPLEQPAGTEWILEEGVTTGPPRKPRADIYNLRSPDEFIVGQNQALIEPG

SEQ ID NO: 33315 - protein, 68 aa, Homo sapiens
MFTAQSMCSPLCTPSQPGAGAHCSGLPQGGSRVSPSAPGGMGVEPGILNTSLRGGINKTVSVPPAPRS

SEQ ID NO: 33316 - protein, 38 aa, Homo sapiens
VMCARFRKAAHSRFLGVSAAVGSWGQGPGCWGVGRGSR

SEQ ID NO: 33317 - protein, 8 aa, Homo sapiens
MAGLGARV

SEQ ID NO: 33318 - protein, 29 aa, Homo sapiens
MSSQYGGGDKPPHTQFPQGVPKNFGAQNR

SEQ ID NO: 33319 - protein, 12 aa, Homo sapiens
MSQDIGGTQTLL

SEQ ID NO: 33320 - protein, 97 aa, Homo sapiens
MFLITQEDGHATGRPRTLHPADGCSRDCQTETTPHTQKAPKSQSLILFLERHCIILDHKICVIGFVSKTWDSGDKTSLQGYLCHCILAAFEAKHFNI

SEQ ID NO: 33321 - protein, 96 aa, Homo sapiens
MKRGALRFYLPCYIVFLGKAVLPYSKPLPSLPTQDLGTGGARHLMPCPRLAGPSISAGELSSADKPAWHGALPLLLVPDPFCPEENFLSPGDAWPR

SEQ ID NO: 33322 - protein, 84 aa, Homo sapiens
MLYEGHIPAKRHKVTEWLPLSGGEKRWMAGTRREGNKYMKKYNPLGQCLAQHKCPGKRGPVAYVPGDRAGTSAGFLVKEATLSS

SEQ ID NO: 33323 - protein, 61 aa, Homo sapiens
MSPHRQAELHLRSPPAAAEERRARPRPGRNPHSLCAPACLKDKVYLQRRDAHIKDNETPKC

SEQ ID NO: 33324 - protein, 16 aa, Homo sapiens
MSRMKTDGLLAPISLA

SEQ ID NO: 33325 - protein, 108 aa, Homo sapiens
MQWRDLSSLQPLPPGFKRFSWFSLLSSWDYRNAPPHLATFVFLVEMGFLHVHQASLTLPTSDDPPASASQSAGITGVSHRAWPKPSSLSFCGCCCEICRTSSCLDSIF

SEQ ID NO: 33326 - protein, 53 aa, Homo sapiens
MKHLQNCPNGPSGDPGNKCLSSHDQSFYFFLILCIWLVYMSQNQVLKQEVIQK

SEQ ID NO: 33327 - protein, 44 aa, Homo sapiens
KPPVFLHLALLYLQAGSPEIPAPNPPCTLGPALLPPERTFLQLF

SEQ ID NO: 33328 - protein, 13 aa, Homo sapiens
MTLSRSLFFILFF

SEQ ID NO: 33329 - protein, 37 aa, Homo sapiens
KNLLRYKRKITEKKRKEPQRSCSVQSQILLLLLWLIG

SEQ ID NO: 33330 - protein, 13 aa, Homo sapiens
RARCRALFLVFII

SEQ ID NO: 33331 - protein, 21 aa, Homo sapiens
VSTRCFVVSVFLLFTLPESVL

SEQ ID NO: 33332 - protein, 38 aa, Homo sapiens
LHTLSGLLLPFFFLGGGGAFCVFFKFFSVGRSRPAKNP

SEQ ID NO: 33333 - protein, 27 aa, Homo sapiens
MTEITSNSSQTFLVATLGILRFSLACP

SEQ ID NO: 33334 - protein, 22 aa, Homo sapiens
VLGLLLLTIISLSLPAFIFSPI

SEQ ID NO: 33335 - protein, 21 aa, Homo sapiens
KSQSRHRNMPLIQCLCLAVTC

SEQ ID NO: 33336 - protein, 31 aa, Homo sapiens
KGILNAISSLLALGHFLLDPALLSAIVKDQP

SEQ ID NO: 33337 - protein, 10 aa, Homo sapiens
IIIMLYLNYL

SEQ ID NO: 33338 - protein, 28 aa, Homo sapiens
LALALALALELRRSLGLSLAARSLDTFS

SEQ ID NO: 33339 - protein, 35 aa, Homo sapiens
KLFTVLLSSHVLFCFLNFPPRSVYTGLSKLLCCWN

SEQ ID NO: 33340 - protein, 36 aa, Homo sapiens
RQRMKLMVCMVTVLLPIFELLEYKLCLCLECPSQSD

SEQ ID NO: 33341 - protein, 17 aa, Homo sapiens
IPHAGHRWKCQTVRVHA

SEQ ID NO: 33342 - protein, 14 aa, Homo sapiens
MDFIYQIALFWISW

SEQ ID NO: 33343 - protein, 70 aa, Homo sapiens
LSFGGISGLLAASRACLVATETSPARLRGHFITIQKCLPLKASVVVFKPQKSHTQDHLTPTLTSVHDAGP

SEQ ID NO: 33344 - protein, 16 aa, Homo sapiens
VVSVASLAGLLFLRFS

SEQ ID NO: 33345 - protein, 35 aa, Homo sapiens
LPGQVLPGSLGAVAWVLTMLLKLVQNSSQSLTSAS

SEQ ID NO: 33346 - protein, 59 aa, Homo sapiens
RSGFRLETLAGLRSRRLKQPKVSWSLCDSGKKWREHSVSPTSFLTLLPYLSFFPTGLSR

SEQ ID NO: 33347 - protein, 28 aa, Homo sapiens
MERSMMILLMAASMTMTSTQLWSFCCVH

SEQ ID NO: 33348 - protein, 38 aa, Homo sapiens
LLAGYFIDTLKVLHMIRKQLWKMTAFISLNILPYGTDQ

SEQ ID NO: 33349 - protein, 15 aa, Homo sapiens
LVFFGGGFSIVLSMC

SEQ ID NO: 33350 - protein, 32 aa, Homo sapiens
VRPANLIKILLESALLVSYLCQISSWETAVTT

SEQ ID NO: 33351 - protein, 31 aa, Homo sapiens
VEGGSPSWLAILLLCVEVLPVACPNPKLEEE

SEQ ID NO: 33352 - protein, 17 aa, Homo sapiens
LLLLFVSLWRGFCGPEP

SEQ ID NO: 33353 - protein, 12 aa, Homo sapiens
IKGSLLLVWGLR

SEQ ID NO: 33354 - protein, 18 aa, Homo sapiens
IGMKWLLVAAWRTPAALL

SEQ ID NO: 33355 - protein, 41 aa, Homo sapiens
VMSPRRRWLFGGSEERLLLLLLLLVAPLQKSSKNSAVGSVR

SEQ ID NO: 33356 - protein, 66 aa, Homo sapiens
MQQQGLSCGPGTWVSLCSWGPGPPMAAHRPISMHFLLSEPITSPDSARLTICGKELPTLGLLSSSR

SEQ ID NO: 33357 - protein, 145 aa, Homo sapiens
LSRLALIAIKATNKFIEMLFPSGNLNLSLACTERGSASGVGEMRRRMSSAYHVVQTQADRGPQKCKYVSSVGNCILGRKSYVLEYHKHPFLPCGTAQRWCEAIHRREVPRTQFSWLKDSNVYISSKRPTLLELHFTCEIRVLGSE

SEQ ID NO: 33358 - protein, 96 aa, Homo sapiens
LNPPVPGLPPEEMIQKVLICLNALLMSSLFANHPVLLCLKRQKKSTVVLAKKLHCQRETHVSSVFTNFLCELPNAFFFRINNNFLKVGQKKGPCPL

SEQ ID NO: 33359 - protein, 179 aa, Homo sapiens [sequence omitted]

SEQ ID NO: 33360 - protein, 15 aa, Homo sapiens
MHRLHPEMEPARTTN

SEQ ID NO: 33361 - protein, 37 aa, Homo sapiens
LNFGVYEDVKWCILQCSLYMLIHLGMGSHSVLFYPIK

SEQ ID NO: 33362 - protein, 57 aa, Homo sapiens
LISLCSCTYVAIRFSTRILRERKSYFFFFLCLGILQQMSLLWWSSHTSPYTSQRECH

SEQ ID NO: 33363 - protein, 79 aa, Homo sapiens
LISLCSCTYVAIRFSTRILRERKSYFFFFLCLGILQQMSLLWWSSHTSPYTSQRECQEVRAQMGGGAWKQCLSWMIKSH

SEQ ID NO: 33364 - protein, 94 aa, Homo sapiens
LISLCSCTYVAIRFSTRILRERKSYFFFFLCLGILQQMSLLWWSSHTSPYTSQRECQEVRAQMGGGAWKQCLSWMIKRLPEPFLVVQEQPHCWK

SEQ ID NO: 33365 - protein, 98 aa, Homo sapiens
LISLCSCTYVAIRFSTRILRERKSYFFFFLCLGILQQMSLLWWSSHTSPYTSQRECQEVRAQMGGGAWKQCLSWMIKRYKHEGQVRRLTPVIPALWEE

SEQ ID NO: 33366 - protein, 55 aa, Homo sapiens
LISLCSCTYVAIRFSTRILRERKSYFFFFLCLGILQQMSLLWWSSHTSPYTSQRE

SEQ ID NO: 33367 - protein, 61 aa, Homo sapiens
VFLVVSDGCLYICWVSGTIPFIIFNCVYLDLLFCLISLASGISILLIFSKNQFLDLLRSLQ

SEQ ID NO: 33368 - protein, 62 aa, Homo sapiens
VLCIWEEVISRVARWDASLLLIRFTIYCSGCFLIPVLLGPGSFAPCPAPRRGGWCGNGWARW

SEQ ID NO: 33369 - protein, 68 aa, Homo sapiens
LGRRAAAGGGGHVATAVAARAAAATAAAASARAAGRPPTLPPRGSPSSLHLAPLVPLARPGAALCFSL

SEQ ID NO: 33370 - protein, 89 aa, Homo sapiens
LLFSRLRVVGLHPAFRVLLRGAPVSSPAQAPLQAAVGFRFASGWGCCFSSPTWILYPSETLEPLWSSLHLMTLRGWSFQVLPERNVPSL

SEQ ID NO: 33371 - protein, 47 aa, Homo sapiens
LVEIQHYTYTPPYILAVNPMEWGIGSAFLIFHSFFLIKWHILHLQLL

SEQ ID NO: 33372 - protein, 21 aa, Homo sapiens
MVLLLVTFLSMDDLLGYGESA

SEQ ID NO: 33373 - protein, 57 aa, Homo sapiens
LLLAFPYGLYLAFPYGLYSTYCLENVAHETPGYYQKERGRRSPLSPEPQHLLVWKGY

SEQ ID NO: 33374 - protein, 36 aa, Homo sapiens
LALLFPFAPVAAAERGGSMCAVSGAIPGPVAPEPRV

SEQ ID NO: 33375 - protein, 46 aa, Homo sapiens
LSLVYFSGVTSVPSFKGGALSLWVICTDCAKQSICSPNVNCQGAAN

SEQ ID NO: 33376 - protein, 48 aa, Homo sapiens
LKMNPHFKSSCLLEVALPVTSLHFSIHGCYSRKSSFLKHISRHMMRLM

SEQ ID NO: 33377 - protein, 30 aa, Homo sapiens
LGPLLLCTLLPSSQISAHLPPRLAAPQLAG

SEQ ID NO: 33378 - protein, 79 aa, Homo sapiens
LLFHLSFSLPLPSSLHPCFPSILLSFILFLHSVTFHHYLFVLLSCLTIILPSSSSSSFPPPLLLFSAPSPRPRPQASAP

SEQ ID NO: 33379 - protein, 27 aa, Homo sapiens
VGTPTRLRAFSSLLFFPFASLLTSPAH

SEQ ID NO: 33380 - protein, 68 aa, Homo sapiens
MQVQVTILFLATSCEKTNIWVTLVSTLVLLLVIVASAAIDHTRVVIQKLVSLFICLVNFIIWFLSITN

SEQ ID NO: 33381 - protein, 10 aa, Homo sapiens
VFMGARFLFL

SEQ ID NO: 33382 - protein, 64 aa, Homo sapiens
MGSRVLGSCSWPVLLWAGLWAAHGRASDKLDQHCPCLRGVSLVFFFLDDYLKGKGRQRVRKGLA

SEQ ID NO: 33383 - protein, 137 aa, Homo sapiens
LFSAAIGTSFPARFPAVKVHGFKTHQRAGRRPMATPGSSVAATKKRESERKTRTDLKGVRTSNGTARDDNCAYSPHRRERGAPPPAHGLYRRSVCARKNHRVLSKTGGRSVRRHDHRRSRSWRLRPGVAQHMRRSER

SEQ ID NO: 33384 - protein, 26 aa, Homo sapiens
MMKSAFCFAESLEIILVAVWSMCWRY

SEQ ID NO: 33385 - protein, 50 aa, Homo sapiens
LLVQSSYSATSSAFPASIVMLVLPGDTLLTAETMNFLQTRQCWWLLHSSG

SEQ ID NO: 33386 - protein, 77 aa, Homo sapiens
MQKSFTFLVHCLGSFTWYSLRSRLSEQPRQPDLRMNLSRQSLTKHLQEPSWGESMRRWVRSGQESKHHLATKPKLCV

SEQ ID NO: 33387 - protein, 81 aa, Homo sapiens
LSSKIKNKPVISCAACVSAAIWAKQSCCSRQARSSYEEKQESTADANFSEKTTGQFYLACSFLLFDNNKDYFNLPGISALS

SEQ ID NO: 33388 - protein, 110 aa, Homo sapiens
LGSSACWPQEYEFSSRDFWDSLHLFLPTGAHGGEAPTDPALDGPAGTTQINKLAYLNLRPPTQELTQCKKTASTPCDFISDQSALLAHWLPQPMKFSLKTLLPKCSGRLI

SEQ ID NO: 33389 - protein, 161 aa, Homo sapiens
LEKAPDQRTQPAGRRAALRPAWAPGTAAGAASYLVKFVLPSAWTQAPVAAREGTGLARLLARPPLPARSPPAASLARPLRSSGSHYSSFQYGILSVRMLGALFFFFFFFFLRFCVCVYVCACACSELLQRPFPALAKFLKPISLRDVIGSFPSQLRAIPCA

SEQ ID NO: 33390 - protein, 20 aa, Homo sapiens
MLGSGGEHSSQLAMRSSGYV

SEQ ID NO: 33391 - protein, 11 aa, Homo sapiens
MMWTLSAGGEG

SEQ ID NO: 33392 - protein, 23 aa, Homo sapiens
MSHLEKRRPHSRGFHDVDTFSRW

SEQ ID NO: 33393 - protein, 114 aa, Homo sapiens [sequence omitted]

SEQ ID NO: 33394 - protein, 108 aa, Homo sapiens
LTPASKCVCVCVCVCVCVCALAVIYDLQWPVCGFGFHCGVENVVCLPSAYVCLGLCVHPSSPALVLRQTKEEGLRTFLASKAPLQACCPTHPAIPRPACIVVCTFICS

SEQ ID NO: 33395 - protein, 64 aa, Homo sapiens
LPPPSLARSPARRLLPLSLPLRMAATAAPPPLKMAKPRPPRLYSPRRHCLPGLVVRGSRAAKAS

SEQ ID NO: 33396 - protein, 52 aa, Homo sapiens
LRAQKAAEASLGPLLSCPWALPWLLSFPTAQPKESPLQLTRVQPPEQRVPQP

SEQ ID NO: 33397 - protein, 36 aa, Homo sapiens
VDMCTKVYVQRGSEITFARAKTLRPMRVFINRRMVK

SEQ ID NO: 33398 - protein, 95 aa, Homo sapiens
MATASGAGLLFLPTPQAPSHPHAQANVSHTGSGGTDPEQQALAPAPSPAFRVNSCTSWNCLRVLPPSDHGQVQVQCFGSDVSGQAQHSSKEIAAS

SEQ ID NO: 33399 - protein, 51 aa, Homo sapiens
LLTCGCLALSSSACPLLVLPPTGPAHLWLLCSDSLRLSLSPAHLLMLSSVP

SEQ ID NO: 33400 - protein, 26 aa, Homo sapiens
LSSRRCPLLLLPPPALLTCGCSVLVP

SEQ ID NO: 33401 - protein, 88 aa, Homo sapiens
MASCLLLLFLNGWSFTMLPGLILNSWPQAILPPWTPKLLGLEGFTHWPGWSAMARSQLTATSASWVQAILPPQPPQQLELQAPTTVPS

SEQ ID NO: 33402 - protein, 27 aa, Homo sapiens
LPRLAPVIPALWEAVASDAGGSPEVRS

SEQ ID NO: 33403 - protein, 109 aa, Homo sapiens
LSRYLKIKKWAMEIFGERVLQAEGLVSAKAQAREHVSCWRSSEVASVAGMVRAREGMILASHPVTEDQEKSDPPKCPQLLKCPLSTFLVTDNGNTCFKNKMDLLNIWDH

SEQ ID NO: 33404 - protein, 107 aa, Homo sapiens
LMSLTSLITEGRAPKYMRFSMSTLVPLLEDPSIFYKGFLPILLRSGIPFGSSVPSASPSVVSIPCHNYRICNLRLRSSMICSLQAGYLPGLVGHKANDINSSSSLKA

SEQ ID NO: 33405 - protein, 114 aa, Homo sapiens
MINSFSSRIHVDSRNLRGAGQVQSRVQRWNSIPKAHPAPLSSAKSRNRVTPDELSGLEPRVQPPAPLCVPVPFLQVDRRHLLIGSVHIPPGAQRGPSPCLGTPSQADSRREEGR

SEQ ID NO: 33406 - protein, 7 aa, Homo sapiens
MLEPAVE

SEQ ID NO: 33407 - protein, 27 aa, Homo sapiens
MKREVVKTEQENKPRISPHQPPALPAT

SEQ ID NO: 33408 - protein, 154 aa, Homo sapiens
MRVPRHPGGSHRSAVGLLCEKGPAAPSLVQIRCQTVFLGIHPNRSLISLCGSPGPPSRPEPKCLGSRERPVPFFSSLATSSHFRLLTVPKQPPKTLRELGPGPEAENGRKKRSGRFIKLSLQILQYRHCLLSSLWMVCTHPCLQVFRKNAQELF

SEQ ID NO: 33409 - protein, 13 aa, Homo sapiens
KYQIIIMLYLNYL

SEQ ID NO: 33410 - protein, 13 aa, Homo sapiens
ITQLGPGSGGEDR

SEQ ID NO: 33411 - protein, 21 aa, Homo sapiens
LGMLLCLCIWSLFGATVDRHL

SEQ ID NO: 33412 - protein, 12 aa, Homo sapiens
MEATTQGHSEKG

SEQ ID NO: 33413 - protein, 19 aa, Homo sapiens
MNTWMKTSISWWLCMTTPL

SEQ ID NO: 33414 - protein, 31 aa, Homo sapiens
IHSRNPRQYSTEGEASTREISGTLILFRFFI

SEQ ID NO: 33415 - protein, 70 aa, Homo sapiens
RLALLIRHATKSWPVEHTSIFITQVSWKVVHFSFWEVMATKTEDPGSTNVNDGSLGRTTKTEVSIFYAWK

SEQ ID NO: 33416 - protein, 15 aa, Homo sapiens
VTGIKNRMHPLLQSH

SEQ ID NO: 33417 - protein, 18 aa, Homo sapiens
IDFFILFCLLGRTWLQGF

SEQ ID NO: 33418 - protein, 17 aa, Homo sapiens
ITVGGIMILAGLTSSHL

SEQ ID NO: 33419 - protein, 34 aa, Homo sapiens
RTALMIITAGLLACPSHPMHPFCQIIRMREWKTS

SEQ ID NO: 33420 - protein, 27 aa, Homo sapiens
THLVSKEFILRRVCVCVCLFFLLNLFK

SEQ ID NO: 33421 - protein, 166 aa, Homo sapiens
MWAGYILQEERPGRVVTACARLQAFCRARTSRCARSCSKLRVAHNMGLQLRLEGPRSANLPWVAEKEEESAESICGQQSLKYFLTDPLQKKFTHSCSQQLPYCAQSVCHLRLAKLSREERQAKIVQYAVLLGGQQLKPQSPEFDPRTLWLLVTHLENYQIESSLPV

SEQ ID NO: 33422 - protein, 111 aa, Homo sapiens
MSLKSATKWGRRCNYYYQHLESIMNLLEYFLALTSFILRCSYWIFPSANNMEVPIQGQIIPGFIWSCLKVKSLEFLMIPFLYGLQFDRWEFSTLKKYPQVTTDVLTPSMFR

SEQ ID NO: 33423 - protein, 7 aa, Homo sapiens
LIVLLFA

SEQ ID NO: 33424 - protein, 31 aa, Homo sapiens
MWCLVIAVSVALPCFPGWVFASHHGGRARGD

SEQ ID NO: 33425 - protein, 44 aa, Homo sapiens
MFKLSPIGLLFMFVNIPGTNFNINNLKFYGSIQSCVKPESRDQT

SEQ ID NO: 33426 - protein, 53 aa, Homo sapiens
MLSPRLTRTWREDLGFSPVSINLKKWDLMEGRGGNAEDVLLSRCHNSSPVRLI

SEQ ID NO: 33427 - protein, 48 aa, Homo sapiens
MRGRARTSRLGALEKELELHSNSQASSCFCLCVKQIVTTHFETQAPGL

SEQ ID NO: 33428 - protein, 50 aa, Homo sapiens
MNISTNKKIISWYSMLNMETAQFSWRTVHLMSLDILSMIIQYLLMGSLFS

SEQ ID NO: 33429 - protein, 41 aa, Homo sapiens
LKAASWGLFVITALQRFKGGDGACAGLSSHPSEELMFTGYA

SEQ ID NO: 33430 - protein, 13 aa, Homo sapiens
ITNISFCGAMLTF

SEQ ID NO: 33431 - protein, 49 aa, Homo sapiens
ICSMNENGKFPGLPSAQLSCLPPFASAAHASLSSVFCAWTLWAHPGHGG

SEQ ID NO: 33432 - protein, 20 aa, Homo sapiens
LSWRVTMKIILLSSGMPLLL

SEQ ID NO: 33433 - protein, 14 aa, Homo sapiens
LLLINIYMYLCTSS

SEQ ID NO: 33434 - protein, 38 aa, Homo sapiens
ILKVESPAPAAAAAAVAVVVAAAAAGERARAGKPQSEI

SEQ ID NO: 33435 - protein, 17 aa, Homo sapiens
VSACRFFLCLFSALPRP

SEQ ID NO: 33436 - protein, 7 aa, Homo sapiens
RVFMFLF

SEQ ID NO: 33437 - protein, 35 aa, Homo sapiens
TSSTRPRWRTLTSTTSLWCSSWGSTARARPPSSDT

SEQ ID NO: 33438 - protein, 32 aa, Homo sapiens
IGLVSKTNAIISLKKKEIGIQVNTTVPLNMPT

SEQ ID NO: 33439 - protein, 21 aa, Homo sapiens
KMDPQRRFLVASLVAGVCIET

SEQ ID NO: 33440 - protein, 10 aa, Homo sapiens
MWIQTFLSVL

SEQ ID NO: 33441 - protein, 28 aa, Homo sapiens
IHFIFITMGRILLLSSLGQTSEDFSDGS

SEQ ID NO: 33442 - protein, 19 aa, Homo sapiens
LTFSSLASFPLSVLVLLTS

SEQ ID NO: 33443 - protein, 39 aa, Homo sapiens
KVSWSLCDSGKKWREHSVSPTSFLTLLPYLSFFPTGLSR

SEQ ID NO: 33444 - protein, 33 aa, Homo sapiens
IMAIFFFFCIIVSSLPTAELGTENACSTCLLNE

SEQ ID NO: 33445 - protein, 15 aa, Homo sapiens
IWSLAASFLEFITLL

SEQ ID NO: 33446 - protein, 20 aa, Homo sapiens
MKSQAHYCLVLMSLVLKILE

SEQ ID NO: 33447 - protein, 56 aa, Homo sapiens
IKICLLLILMLPAQQVHQRARMNYGCHECPCEAVGKPWLDCEGYLKSILESTRSSM

SEQ ID NO: 33448 - protein, 36 aa, Homo sapiens
MVNQHHLSVSSLLTSPGLSVVYSINMFLAGLSGSCL

SEQ ID NO: 33449 - protein, 49 aa, Homo sapiens
MLPTLTAPTLALLLLPKISCLLTSTHPRTQGSRAHFPRAWRTPQTPSSM

SEQ ID NO: 33450 - protein, 27 aa, Homo sapiens
ILLFCLPFLVALNEIQMHYPELKLPYF

SEQ ID NO: 33451 - protein, 7 aa, Homo sapiens
LLYGILF

SEQ ID NO: 33452 - protein, 16 aa, Homo sapiens
KFTLLLTGVNVYLQSL

SEQ ID NO: 33453 - protein, 17 aa, Homo sapiens
VLGFQQLLLALPLAAFS

SEQ ID NO: 33454 - protein, 91 aa, Homo sapiens
LGADLFLTQLLLLVSSPPLFREEDHGQGWAKHQGLTQCFSHANVCENHMKTDSDLAGLERGLGFCFTLADSRPWRLYKWGQFGGNLMSKGN

SEQ ID NO: 33455 - protein, 51 aa, Homo sapiens
MNSSRSETVFIHFYISNTWQSASAIKDNLPLKPSVGTEISARKASATRIIW

SEQ ID NO: 33456 - protein, 32 aa, Homo sapiens
MESRFCFLLLGVENIPARMSSKRRETASLERK

SEQ ID NO: 33457 - protein, 72 aa, Homo sapiens
MLMLMFIICIWTKRSSVLQDRTILKLFRNRNRSPSQTAKSKAPYIEASRLRAERDLGNHLVSLPHFPFRPQG

SEQ ID NO: 33458 - protein, 64 aa, Homo sapiens
VFTGQLLRAVIECGRLLTKMFAKSLLSPNSLLLAVSLCQLLLSIGEDCFSSPLNMGWACNLLDQ

SEQ ID NO: 33459 - protein, 68 aa, Homo sapiens
MCVKHNFSHIPGLLRKLVQKWKFALLQHTIAKDEFKKLHTNSLYYILYFVNTVYHVLCVYCSYLRGIL

SEQ ID NO: 33460 - protein, 76 aa, Homo sapiens [sequence omitted]

SEQ ID NO: 33461 - protein, 35 aa, Homo sapiens
MVAPRAAPPAGAFLSGQAVFHGRELLAELPLLSKH

SEQ ID NO: 33462 - protein, 32 aa, Homo sapiens
MVAPRAAPPAGAFLSGQAVFHGRELLAELPLS

SEQ ID NO: 33463 - protein, 21 aa, Homo sapiens
MKFVDTVMILILAMVSQVRCT

SEQ ID NO: 33464 - protein, 13 aa, Homo sapiens
MEKNEDSRHMIPL

SEQ ID NO: 33465 - protein, 25 aa, Homo sapiens
LWGFLLDADSVFLMCAFGLLCNSSW

SEQ ID NO: 33466 - protein, 95 aa, Homo sapiens
MMSFGFGFLPKNCKWCLLALLRILPLLQISEKRLECSGAHASHCDTAGEPRATAVGMTALFLLKSDLSKPLSYVWRLLGSWSTQIATANLRNGHE

SEQ ID NO: 33467 - protein, 64 aa, Homo sapiens
LCAFVFLYFFSFFFFFFFCYLIIFLILDEVAGFCSTSLHEQAAPLRDFTAFKGHRTATMVKCLV

SEQ ID NO: 33468 - protein, 79 aa, Homo sapiens
LNMAIPAFSSCQQISSAAALQICNGPFKHFSFTVSTMLSFVSRCHWSSIAEESEFLFLILVCYFSSSCSSCIIHQWYYV

SEQ ID NO: 33469 - protein, 11 aa, Homo sapiens
MWLLPFAFYLD

SEQ ID NO: 33470 - protein, 90 aa, Homo sapiens
MDGINLWLSFNWRSQHMCFQEATRHSSLSAADFNVHFMHQSERIQCIRYFNALHHRNVKLVKGLIYGISIISLVGMLCQVMCLLSHFVVF

SEQ ID NO: 33471 - protein, 31 aa, Homo sapiens
MRLLNPGIRLLLDLLSLYCMSKATELDQENS

SEQ ID NO: 33472 - protein, 43 aa, Homo sapiens
MAFLLLSLVHPLTTSHEFSELFSHSLCFVALSQCRGKNQMTAL

SEQ ID NO: 33473 - protein, 20 aa, Homo sapiens
VLGTMVLVIFLRANGVGTPA

SEQ ID NO: 33474 - protein, 44 aa, Homo sapiens
VPLRRSWGRGPAPRAFLRPAGGAGAALVAVVASAAASADRRHQR

SEQ ID NO: 33475 - protein, 31 aa, Homo sapiens
MRLTALFFLVNFMKSPFHSTGTCLKELCRWC

SEQ ID NO: 33476 - protein, 50 aa, Homo sapiens
MWPRPPAPVTLQPSPLLPVVASRPSSQSDPESLNQPAAPSPVLQLPSPPG

SEQ ID NO: 33477 - protein, 33 aa, Homo sapiens
LVIYETLCGVKIGHAITLLFLVCLKRMTFTYKM

SEQ ID NO: 33478 - protein, 34 aa, Homo sapiens
LLHFRQCPVHAMVPRHLSSLWSLWLLSLAAPPVP

SEQ ID NO: 33479 - protein, 51 aa, Homo sapiens
LAEVTLSTRARGSVRSGRFAVAGAWAAGCLTSLPLAHSDLCSDPASLFLGV

SEQ ID NO: 33480 - protein, 60 aa, Homo sapiens
LGGSSPWGLLALRLAVAACRRVSVSVRRLRVARLLLTVLLGPKSGASPLLAAASPEIDPQ

SEQ ID NO: 33481 - protein, 83 aa, Homo sapiens [sequence omitted]

SEQ ID NO: 33482 - protein, 59 aa, Homo sapiens
VVTGSILLSLPITQHLPLKALPRPGLPPFKMSGSVQDLLLGHIALLGLVQVILPPQPPK

SEQ ID NO: 33483 - protein, 25 aa, Homo sapiens
LLYIIYIYIISLRLSLLVYPPGLGI

SEQ ID NO: 33484 - protein, 36 aa, Homo sapiens
LRPEPFCISPSSSLCRAMAVCTVAVFFCFFRTGFGG

SEQ ID NO: 33485 - protein, 14 aa, Homo sapiens
LIFISLGAFFLGKY

SEQ ID NO: 33486 - protein, 69 aa, Homo sapiens [sequence omitted]

SEQ ID NO: 33487 - protein, 15 aa, Homo sapiens
LRLMGMFFQLAFWRM

SEQ ID NO: 33488 - protein, 15 aa, Homo sapiens
MYPALCWNAEETGVK

SEQ ID NO: 33489 - protein, 161 aa, Homo sapiens
VGVGPSEPGAGYNLVVRHFLSPSEMRSIRVGVTRFSRCRPSPLSLIRKGNSLTPSTSRVRQCLALLRLAHGAHPLTCAHCLALPSEMNPVPQMEMQKSPVFCVAQADCCRPELFLFGHLASSPGIFLIDPGPGKEMNEDATLCPEHISHSMIKDLWLGQLL

SEQ ID NO: 33490 - protein, 20 aa, Homo sapiens
MFLFLFFSCMHSQEVVPISH

SEQ ID NO: 33491 - protein, 64 aa, Homo sapiens
LTKFTKRCILLTPLFNPLVACQCLCVYLDRHSFIVIQSIGRVYVSIFWQAYRCLRLMGKNQHEL

SEQ ID NO: 33492 - protein, 44 aa, Homo sapiens
LYTRTKTDKYPHHDVTHIAADFFREKCVLLLFETSVVVALYCNI

SEQ ID NO: 33493 - protein, 51 aa, Homo sapiens
LARGRIASRSCAALAAAGTPCSALSLGPETSHSPHTPPPQLRFSGGRGEGR

SEQ ID NO: 33494 - protein, 51 aa, Homo sapiens
MSVGRIASRSCAALAAAGTPCSALSLGPETSHSPHTPPPQLRFSGGRGEGR

SEQ ID NO: 33495 - protein, 145 aa, Homo sapiens
MMSPDERRKKTRCLRRPKGRGCQEPWRANSSQPPWCKVPRGEEFWSSAYLERCLNSEPGIVSNSRRSGNRLFRCPGALQTNKQQKQMVTEPAVSFLGVGDDGERGKNRPLAGPWLGEVLRSAGTLRALCVYRPIPAPTTPSLRPR

SEQ ID NO: 33496 - protein, 82 aa, Homo sapiens
LASKKSCSVPCVLSFKGIFRINSDLEDSSVLQRLAFIFIVIMEMLSFILSYIRKKGVMQLISISLGNALVLFSSFLVPVTCL

SEQ ID NO: 33497 - protein, 45 aa, Homo sapiens
MYYIIIQKGSIHYTDYIVQSSAANSLRFIFFFFLSLWNRLCCSGG

SEQ ID NO: 33498 - protein, 88 aa, Homo sapiens
MRHQSIYVRCTSVSSGKMGQHEAGRGLPGDSSLFKMPRTWMTHSQDPPPVTYIGEPARRPLQETLHLFHLTSHLAASSTIEMNLTLII

SEQ ID NO: 33499 - protein, 109 aa, Homo sapiens
LLPRSAPRGRGVGALLRSSLGVAVGRGSDPGPAVVPSSLPPFLRIASFLLTTASTVRSPAEPGPGGESCLHGRAPRPHRRSRHHLSPSLVPAMGFVSSSALVTDLDTEY

SEQ ID NO: 33500 - protein, 57 aa, Homo sapiens
LDTPSVFLCLYGLLGFLPSQRALLQWCGLPGSLILADHGEHPGLPPLHPQGPLGPVP

SEQ ID NO: 33501 - protein, 58 aa, Homo sapiens
LNPAPSVFLCLYGLLGFLPSQRALLQWCGLPGSLILADHGEHPGLPPLHPQGPLGPVP

SEQ ID NO: 33502 - protein, 80 aa, Homo sapiens
MFFIKRTEDHVCWWALDSALSSNFAVSAVITAGNEKGKGLQLVSLCLWSTRGGHEASAGTALKAEFSGPCEGGKLACLGA

SEQ ID NO: 33503 - protein, 47 aa, Homo sapiens
LKPPVMFCKQVPLQNQRYLRGNLDARPALAAGLSFFTCKTGILELLN

SEQ ID NO: 33504 - protein, 12 aa, Homo sapiens
VRMCAAVLWLFG

SEQ ID NO: 33505 - protein, 19 aa, Homo sapiens
MATQVMKTVFEKMGKHRNI

SEQ ID NO: 33506 - protein, 28 aa, Homo sapiens
MKCLQILFFSRMSTLESAGLFQVPRVIP

SEQ ID NO: 33507 - protein, 43 aa, Homo sapiens
MVPHRPFLCFFLVLFCFDCTVSFVVSSSCQNKREMNWTYVDKS

SEQ ID NO: 33508 - protein, 105 aa, Homo sapiens [sequence omitted]

SEQ ID NO: 33509 - protein, 97 aa, Homo sapiens
LSLSWRPRETLLRRLRLRVGTALLCGAGPGWQLPALGGEGGLPSGPPPKAVGPAAEARMPSRRRGGSSLIPDVGYLSEVDCPWPEHFPKIILSKISV

SEQ ID NO: 33510 - protein, 61 aa, Homo sapiens [sequence omitted]

SEQ ID NO: 33511 - protein, 25 aa, Homo sapiens
MTVWVAAFAVNHAQATQRHILGFWD

SEQ ID NO: 33512 - protein, 79 aa, Homo sapiens
LLPCNRRHVTEEADVTVGPLIFLDRRGDHEVEQWALPSDTSVVLLGVGLAVVVSLTLTAVILVLTRRCRTASHPVSASE

SEQ ID NO: 33513 - protein, 37 aa, Homo sapiens
LRSACWNDGGGGGFQYSPGFVRSTGTPSLEVRSPHSG

SEQ ID NO: 33514 - protein, 62 aa, Homo sapiens
IQIMAKRIWSLKICLTWYIRLLSQSQVTEHAFPTIYLQMHSILTLLELKRQIGEEDKINICK

SEQ ID NO: 33515 - protein, 49 aa, Homo sapiens
MVLKRSTEAAPSPMWCPAPLALPLASCPLLVLFWHHLQQGRVWPLLQLG

SEQ ID NO: 33516 - protein, 58 aa, Homo sapiens
LVFLLLFSSFVFFFSLETGSSYVGQAGLESPGSSDPPASASGKVGLQARIAAPGQSLF

SEQ ID NO: 33517 - protein, 39 aa, Homo sapiens
MKRRKGSFATTQEHAPNVAAQGSVLDPVVQDCLPRADRH

SEQ ID NO: 33518 - protein, 33 aa, Homo sapiens
MGLHLADLSCRSWDLTASIITNPPSRSLGASIP

SEQ ID NO: 33519 - protein, 10 aa, Homo sapiens
MECPRRLSRS

SEQ ID NO: 33520 - protein, 19 aa, Homo sapiens
MITKVVFPEQGLAILLWMC

SEQ ID NO: 33521 - protein, 44 aa, Homo sapiens
MKPRTLAVSATAFKVAPLEFVPSDVRMCSEFLPSGGFVISLAQE

SEQ ID NO: 33522 - protein, 104 aa, Homo sapiens
MSVEPAPLTCIQLPLPPGPCSQMEVSPNTQIAVLLLLWEAPGLRQQDDELAELRTGCLETGTAAFIRRNSCSRVWWLTPVIPTLWEAEAGRSLEVRSSRPAWPT

SEQ ID NO: 33523 - protein, 44 aa, Homo sapiens [sequence omitted]

SEQ ID NO: 33524 - protein, 80 aa, Homo sapiens
MVRRFHTLWRVSFLDNSGSCCVARAALELLGSNSPLASASQRAGITGASHPTVCSPEVEPERKMRDCLGATTSTMSPCTG

SEQ ID NO: 33525 - protein, 22 aa, Homo sapiens
MNDRGQGVLSLGLCIPPSLALG

SEQ ID NO: 33526 - protein, 51 aa, Homo sapiens
MHALRKTGTANAEKVTGADLTWKRKHRLHEPPRLLRISLCGCTRRGHLQRI

SEQ ID NO: 33527 - protein, 60 aa, Homo sapiens
MNETNIPAQGIHNRVRGNKRINNESLVLREAMYIISSSIKRITWQETETFCQLPCERTWK

SEQ ID NO: 33528 - protein, 38 aa, Homo sapiens
MAPPRAEGAERPSKYSLNPRRDSRQSGRPPKAASYVTA

SEQ ID NO: 33529 - protein, 51 aa, Homo sapiens
MSTAFCPIHSSLGSMVMCLCILSPLCIASKSLRVCTKSYMKAMGKPGCQWF

SEQ ID NO: 33530 - protein, 48 aa, Homo sapiens [sequence omitted]

SEQ ID NO: 33531 - protein, 47 aa, Homo sapiens
MGGELLPLNKTLHSFSKPMGDPILQVQQGKNPDTESPLFLPQRRGPN

SEQ ID NO: 33532 - protein, 43 aa, Homo sapiens [sequence omitted]

SEQ ID NO: 33533 - protein, 66 aa, Homo sapiens [sequence omitted]

SEQ ID NO: 33534 - protein, 38 aa, Homo sapiens
MSPEALVHMKLFLLFFRGRCRSWLMEWILHSDISWGCL

SEQ ID NO: 33535 - protein, 86 aa, Homo sapiens
MCLTEKVRVLDKLQSGMSYSAVGHELNVNESTIRYIKKKEKEIHRSVREAAPDSAEVTSIVRDEAMTKMEKMEKRLNLWIHEMSID

SEQ ID NO: 33536 - protein, 22 aa, Homo sapiens
MARLAVVGGDAGDCSWATVVEM

SEQ ID NO: 33537 - protein, 104 aa, Homo sapiens [sequence omitted]

SEQ ID NO: 33538 - protein, 211 aa, Homo sapiens [sequence omitted]

SEQ ID NO: 33539 - protein, 63 aa, Homo sapiens
MELPLRAARPAPRRARSLLCGQVIGLAVLRPQAAAAPQRWSPKSSSSTWEVTSCSPWMALCSP

SEQ ID NO: 33540 - protein, 192 aa, Homo sapiens
MAPRLLHQALLGPGSRPVSPVAPRRPPAGARGRDAGRADRNETDSSGPAARKLPRLPRLPHARRARTLLFLRHLGRDWARPGLLGAHWRREVLVTAPSCPFMHARRPPASKEGAVCGIARPKTSRVNSSQDQIQVASENTHSGSLHQRPASGARLPASCGQELPLFSQRAVGGLEPRKQSEAHTPASFLPCS

SEQ ID NO: 33541 - protein, 15 aa, Homo sapiens
MGLLCAEAPWDVLSS

SEQ ID NO: 33542 - protein, 10 aa, Homo sapiens
MDKELRPQGC

SEQ ID NO: 33543 - protein, 27 aa, Homo sapiens
MPRDRGCLGPRRVPRCHLALTSRRSWL

SEQ ID NO: 33544 - protein, 39 aa, Homo sapiens
MAAGAVFLALSAQLLQARLMKEESPVVSWRLEPEDGTAL

SEQ ID NO: 33545 - protein, 6 aa, Homo sapiens
MRETGD

SEQ ID NO: 33546 - protein, 29 aa, Homo sapiens
MPPASKRVLCVDSLGNQRLEIPVKTLSRS

SEQ ID NO: 33547 - protein, 91 aa, Homo sapiens
MLRLTLRGTPTVTSNTHRTQPPTWGQIKKLSQMAEENLRKVGQPVTMSNLMIAMIVVITIAMSIPSTRAGTEDNYTYWAYLSILAGNNAWM

SEQ ID NO: 33548 - protein, 89 aa, Homo sapiens
MNFLTELSFGLLPFTLDVTCSSLPPAMIVRPPKPCGTMGVYLHKTLFLPATIHVRYDLLLLAFHHDCEACPDMWNSDISLLRYSLAQKG

SEQ ID NO: 33549 - protein, 79 aa, Homo sapiens [sequence omitted]

SEQ ID NO: 33550 - protein, 73 aa, Homo sapiens
MHECPHGEPPPPAAPALMITPIINWGMALCLVLALHGPRTLHRTQRVTLKNAVYLHLFLFDRRQLLVTLGTSK

SEQ ID NO: 33551 - protein, 255 aa, Homo sapiens
MASGRQVLDQDPVEVSGRAVGATVFSNASTRRMDFLQALRDSGPSGTFPDLGGSGPQLPGSTAAASLASWWVEGLRTQSADPEARRRPGVRGPPCPSISKAFCLSAPLTGHPGWTGLAYAPQRVRHPQQGLGVLCPRLTWKGGRKDAVVPFSGQIFWPDSAFRAATSGDSALPPWRPPGRLAALGDPSVDTPVKTGLPGSRLSQSAPRSVPVRASSSRVPATLGQTWKPSGRRRRPGLGCADTAPATFLRRWRDC

SEQ ID NO: 33552 - protein, 29 aa, Homo sapiens
MCRGRSHEWQRQGRDCRDRLEPKHVALEP

SEQ ID NO: 33553 - protein, 35 aa, Homo sapiens
MCYLVSSFLIIWCLSKMRHRLVCRVEWERHFDLLA

SEQ ID NO: 33554 - protein, 50 aa, Homo sapiens
MLLKLSCNTHCCGPSLHSLKPVEPQTLQLIKTFDRKRLLISFLGACPGFL

SEQ ID NO: 33555 - protein, 69 aa, Homo sapiens [sequence omitted]

SEQ ID NO: 33556 - protein, 37 aa, Homo sapiens
MKGNKNSVENCWGQWHELSCKVMSVPWRDTRARTAWF

SEQ ID NO: 33557 - protein, 146 aa, Homo sapiens
MESEPLAGTKTRGRGRRRWEARHGWTLPAHASQPSPRTVVATATGAEVLARAGRSAGTRVAGPESQLSHLYGWDKYSNPRPSRRARAVARVHALEQAGVGLIGAIVQCREHTRTLRIVSCHKDPEQMDPAVMHKEDHARYDKDLHH

SEQ ID NO: 33558 - protein, 36 aa, Homo sapiens
MAPTSASGEGFMKLPPMTEGEELLPASCYKPEGKVY

SEQ ID NO: 33559 - protein, 51 aa, Homo sapiens
MRERKSWDPPRPSECDVLLRVSWGNFLYRRDVGGSDSVTSDKGVDSAAQNQ

SEQ ID NO: 33560 - protein, 66 aa, Homo sapiens
MQVQVTILFLATSCEKTNIWVTLVSTLVLLLVIVASAAIDHTRVVIQKLHIGKDFITSRTMQIDVD

SEQ ID NO: 33561 - protein, 38 aa, Homo sapiens
RLWWALIQLGYLRSIGHTLLETGKMANTCRLFCVTHWG

SEQ ID NO: 33562 - protein, 31 aa, Homo sapiens
VDARAGLRPLLAAVNSFGQLMIFIIVPSFYK

SEQ ID NO: 33563 - protein, 40 aa, Homo sapiens
VAPSVPTGRRLGFSRVQGSMDVDNGSGPWLAQEPGPDTRA

SEQ ID NO: 33564 - protein, 43 aa, Homo sapiens
MFFSWMVLMVVDVLQCLDIKILGMQHHMRGLKNKIKKEKRTQS

SEQ ID NO: 33565 - protein, 38 aa, Homo sapiens
LSKDRPRALRSWGSNSPWMAKQANIRHGSGCWKGGSRS

SEQ ID NO: 33566 - protein, 40 aa, Homo sapiens
IFVSALLMYPQQPELPDMSVIAALLIILPTADPFCETPGC

SEQ ID NO: 33567 - protein, 29 aa, Homo sapiens
VISTQSLSAKASLGSLIKLELWVQHFTWT

SEQ ID NO: 33568 - protein, 25 aa, Homo sapiens
METSKEARLLELLPPLLRDNIDYPG

SEQ ID NO: 33569 - protein, 24 aa, Homo sapiens
ILLQLAQDLFPRLCPLALPSLLVL

SEQ ID NO: 33570 - protein, 53 aa, Homo sapiens
MLQSNFFFGLILLSSHSPIVDPDSNFPPNFCKLSMISESPDLQHYYIHYSPCT

SEQ ID NO: 33571 - protein, 49 aa, Homo sapiens
MGFSVGEASIRQEGVPGCWLLVLFSFKSSVLLQRRRKKLVPWRCRNLWL

SEQ ID NO: 33572 - protein, 109 aa, Homo sapiens
MQVQVTILFLATSWFPMAPVSRSSNNSGSSSDFKSSNNLKVFQIILSFQKIHIFQTIHVFRTIHVFQEAPSLPVNQVFQQIQSSSNYWSSTKSRSSRKIHVFQEIHVFQ

SEQ ID NO: 33573 - protein, 51 aa, Homo sapiens
VQEAATAAAAAAAAVAAAAAAAAAAAAAEAPVAAAASPATTTKKNPHQILT

SEQ ID NO: 33574 - protein, 24 aa, Homo sapiens
IILRYPNVQIAFFIMNVLFFLVIV

SEQ ID NO: 33575 - protein, 9 aa, Homo sapiens
IVYFKLICL

SEQ ID NO: 33576 - protein, 42 aa, Homo sapiens
MYTFRKLSPYLNKIVFVCSSVLGQSWGGFFSNLSETLSANTL

SEQ ID NO: 33577 - protein, 93 aa, Homo sapiens
MFTSDVPSNTAEAMSHACPRQGLPSPAARPPAGGAPRPGSSRVCPWPGSSGVGPSLQGGCVWPAFGAAGRRGGEWLGPAGRGFIRRFPSRAAR

SEQ ID NO: 33578 - protein, 39 aa, Homo sapiens
MGPIIMTSVQGTVCRNVIEIQVRASLPFSLQKQNQDNLS

SEQ ID NO: 33579 - protein, 34 aa, Homo sapiens
MLRYLRSIPSCWMLGPTSGQEGRAHPFLEETLTQ

SEQ ID NO: 33580 - protein, 40 aa, Homo sapiens
MSPRRRWLFGGSEERLLLLLLLLVAPLQKSSKNSAVGSVR

SEQ ID NO: 33581 - protein, 83 aa, Homo sapiens
KHYILALAALHCSSVLLVEIWILRREHSTALSSQENSRCKKLQCINCREESTVLQAERATTALLFNEREKMKERENFRRLGPI

SEQ ID NO: 33582 - protein, 75 aa, Homo sapiens
LLFLLLVLIFPSLLGLQPGLLRNWKGGKTNLAYSNCFSSCARHYGSFSSLGLSVNKFGKLDNRPFTEMTILYIAI

SEQ ID NO: 33583 - protein, 18 aa, Homo sapiens
LSFWISLFLVLSTKDPFL

SEQ ID NO: 33584 - protein, 8 aa, Homo sapiens
LLLINLFL

SEQ ID NO: 33585 - protein, 15 aa, Homo sapiens
MTITHVFMVLIRFVS

SEQ ID NO: 33586 - protein, 30 aa, Homo sapiens
MKIFMMIHFHVINSKCFLFLVICLITFSFL

SEQ ID NO: 33587 - protein, 14 aa, Homo sapiens
ITRFIFALVSLAGG

SEQ ID NO: 33588 - protein, 37 aa, Homo sapiens
MSTKLVVLVLFLLAEWRLVFSNPVWWSPLLQSTLQRK

SEQ ID NO: 33589 - protein, 57 aa, Homo sapiens
LNQKLLFSSPASALLFFARPCVFCFKASKMGPQFENYPTFPTYSPLPIIPFQLHGRF

SEQ ID NO: 33590 - protein, 74 aa, Homo sapiens
LLQWREIITDGGTRRPSFPHRLLSLEASSEDLVGLSFWVWAISVLMCVLFYHYCIMVFKPVGTQRTSLCNNNEE

SEQ ID NO: 33591 - protein, 18 aa, Homo sapiens
VESFVFLLFSIRVSCSAA

SEQ ID NO: 33592 - protein, 31 aa, Homo sapiens
MLRNSGILGLVRRSFRGLDSSKHMYRNAYFI

SEQ ID NO: 33593 - protein, 34 aa, Homo sapiens
MWRRSLWTFSRSGSLRRTGRIVLVARAQSGVAWS

SEQ ID NO: 33594 - protein, 23 aa, Homo sapiens
LRFKVLLRVLFFMAPVPPQVFGQ

SEQ ID NO: 33595 - protein, 71 aa, Homo sapiens
VGFCLLACFCFIFALNVHPGLGCLPPRVLHYTSCLSLPERVARVLMPRDTIRRMDLSCHAGQGRAAGRAMS

SEQ ID NO: 33596 - protein, 48 aa, Homo sapiens
LWGKPARGALAQACLPGVLVVYPSVALESPPAPFHWVSPQTKPLDLSF

SEQ ID NO: 33597 - protein, 43 aa, Homo sapiens
LPSIPTWTTAKAFQLFLLPLLLLYNSFCTQKSESKSKFIMSFS

SEQ ID NO: 33598 - protein, 69 aa, Homo sapiens
LRRSTDKLSRAHGLQRVQANLKLLMSILLMLPPGSNEAWAGCPKLLIFILALPQLSQQRIHWSSNQTRE

SEQ ID NO: 33599 - protein, 32 aa, Homo sapiens
MPCETAIRYIFSIIFKTILHTFNFITKFHFII

SEQ ID NO: 33600 - protein, 11 aa, Homo sapiens
MGRGIIIWCCL

SEQ ID NO: 33601 - protein, 36 aa, Homo sapiens
LGRTLLSFIAFYSVTACAWGKTKVISEQNAADSRIG

SEQ ID NO: 33602 - protein, 34 aa, Homo sapiens
LVENKKITFSVFISIMSLLSYFIYFWQSEFLKPI

SEQ ID NO: 33603 - protein, 93 aa, Homo sapiens
MMSVLSGAMWSATSRSARPSPAPMAGRRCPRLTAAVSDAKLPPSPACTRAVRWPLESAGLWTPAPAAPAWRAPCVARASAAHRSRVAPTRPLP

SEQ ID NO: 33604 - protein, 48 aa, Homo sapiens
LQGPTSGFPGSGFGPRRRGRKARAPAFPGLSLLGCLWSGQPGSREIQP

SEQ ID NO: 33605 - protein, 98 aa, Homo sapiens
LRTARALRGSATLHPERFGAGPRGIQPGTGGDPRTLRKLPPISLSSEPLAQHRPETPASKMKAIFCLWTEYPTKDLILKAMEHVYPHGSSGQTGGETV

SEQ ID NO: 33606 - protein, 15 aa, Homo sapiens
MPHFDPKHIPGFGHF

SEQ ID NO: 33607 - protein, 38 aa, Homo sapiens
MAQRTFLTSRATAVTKEYVAYCLRGWTPESLDSVIIFT

SEQ ID NO: 33608 - protein, 35 aa, Homo sapiens
LLLGVVALLPLCGKRIQALPRACGCGGPEVLVVPR

SEQ ID NO: 33609 - protein, 45 aa, Homo sapiens
MPAAVMSPRRRWLFGGSEERLLLLLLLLVAPLQKSSKNSAVGSVR

SEQ ID NO: 33610 - protein, 38 aa, Homo sapiens [sequence omitted]

SEQ ID NO: 33611 - protein, 82 aa, Homo sapiens
VMDGWTDNSGRMTLLWPHTAACLSVTLYLPASSAKYFKRGEGREKFITNPTTRKKKLFWRRGKRNHDQAFTGIPDQVSLFPF

SEQ ID NO: 33612 - protein, 36 aa, Homo sapiens
MGRGAGRRAKWKGGAPKALYFPCVSLCLWFISGGCA

SEQ ID NO: 33613 - protein, 26 aa, Homo sapiens
MADSCLLSLYFPCVSLCLWFISGGCA

SEQ ID NO: 33614 - protein, 22 aa, Homo sapiens
MHLALYFPCVSLCLWFISGGCA

SEQ ID NO: 33615 - protein, 52 aa, Homo sapiens
LTLRLEGVLIGDLSLGLMSVCLATFSSLLLDHIVVCFEYHSLGYVESRVASH

SEQ ID NO: 33616 - protein, 379 aa, Homo sapiens
MLLPALLFGMAWALADGRWCEWTETIRVEEEVAPRQEDLVPCASLDHYSRLGWRLDLPWSGRSGLTRSPAPGLCPIYKPPETRPAKWNRTVRTCCPGWGGAHCTEALAKASPEGHCFAMWQCQLQAGSANASAGSLEECCARPWGQSWWDGSSQACRSCSSRHLPGSASSPALLQPLAGAVGQLWSQHQRPSATCASWSGFHYRTFDGRHYHFLGRCTYLLAGAADSTWAVHLTPGDRCPQPGHCQRVQVTMGPEEVLIQAGNVSVKGQLVPEGQSWLLHGLSLQWLGDWLVLSGGLGVVVRLDRTGSISISVDHELWGQTQGLCGLYNGWPEDDFMEPGGGLAMLAATFGNSWRLPGSESGCLDAVEVAQGCDSPWGS

SEQ ID NO: 33617 - protein, 377 aa, Homo sapiens
MLLPALLFGMAWALADGRWCEWTETIRVEEEVAPRQEDLVPCASLDHYSRLGWRLDLPWSGRSGLTRSPAPGLCPIYKPPETRPAKWNRTVRTCCPGWGGAHCTEALAKASPEGHCFAMWQCQLQAGSANASAGSLEECCARPWGQSWWDGSSQACRSCSSRHLPGSASSPALLQPLAGAVGQLWSQHQRPSATCASWSGFHYRTFDGRHYHFLGRCTYLLAGAADSTWAVHLTPGDRCPQPGHCQRVTMGPEEVLIQAGNVSVKGQLVPEGQSWLLHGLSLQWLGDWLVLSGGLGVVVRLDRTGSISISVDHELWGQTQGLCGLYNGWPEDDFMEPGGGLAMLAATFGNSWRLPGSESGCLDAVEVAQGCDSPWGS

SEQ ID NO: 33618 - protein, 51 aa, Homo sapiens
LDCCLIFLTLSYFSPADEAAAEKMEAILVNGSHLSSWQRKKRKDPLVRNGD

SEQ ID NO: 33619 - protein, 58 aa, Homo sapiens
LTSFSCPIQAPVLAALLKLSLAPAPAPQPLAKPLLSFLLPPLSLQLRDGPGSSVSAVL

SEQ ID NO: 33620 - protein, 7 aa, Homo sapiens
MIICQGA

SEQ ID NO: 33621 - protein, 47 aa, Homo sapiens
MRTGFKGKWGHQKEAGWCEETSGKSPWRGPSFHWVTQKEKTAMALLI

SEQ ID NO: 33622 - protein, 126 aa, Homo sapiens
LNLSPNLGDSKPESGLTKDARMSGEVSWMQAVCAGTRAPATDEVAGVHRSLLRSSRGFQGRLTRFLGRRFMTAEFLLEDPSSGSLIPQESSWKTRACEGSAAAPRQPDSQPRTAGVDMHGSLDAIS

SEQ ID NO: 33623 - protein, 16 aa, Homo sapiens
MKPRVPTFIIQFQRHP

SEQ ID NO: 33624 - protein, 43 aa, Homo sapiens
MGRPRIFRFTQGPLQTVGRKKVATKHMHKLDFSQNAAAELPSR

SEQ ID NO: 33625 - protein, 38 aa, Homo sapiens
MARLRALPACFTRAQPPASTENVFWNQHSLQRLHTAFW

SEQ ID NO: 33626 - protein, 69 aa, Homo sapiens
LATLVVWTLRRSPEDALRAAFALLSFCLSLLLGVDALRPRRCADGSLDRQDTEKAVGSKGSASGYSGGS

SEQ ID NO: 33627 - protein, 125 aa, Homo sapiens [sequence omitted]

SEQ ID NO: 33628 - protein, 82 aa, Homo sapiens
LTICRSGPDLPLVVRPIQLLLLLWLCEEVPSCCWLHIRKAVMGMKVKTWRFHFSHCFCLQDHPLKVEKLLCVVVNSKRQNSF

SEQ ID NO: 33629 - protein, 62 aa, Homo sapiens
LTRSRGPRRPALLLALPPRAPAPGSSRAGMLLRSRAASGPATCSPGKRTRRGAAGLPGVLPP

SEQ ID NO: 33630 - protein, 130 aa, Homo sapiens
LRCCHPLLTLLLLSPSAFTPLLFRITPSTLQGPGGPRNQDPEGGALLTSHRGSAREELSPVEQNGNHLQRSPDPKQDGRQLLGGAKSPGILSLGLRALESKGKPPSLQGFSVCLGCCSGQGGSPTPSKQK

SEQ ID NO: 33631 - protein, 59 aa, Homo sapiens
LVWSVFWIFTILIEIHGSIRVVRAPLAPLCGYSPVPFSEATGQKPLYNALPNSRILKET

SEQ ID NO: 33632 - protein, 56 aa, Homo sapiens
LQKPEVQEAATAAAAAAAAVAAAAAAAAAAAAAEAPVAAAASPATTTKKNPHQILT

SEQ ID NO: 33633 - protein, 52 aa, Homo sapiens
LQPPRESSARHQVTRPQPPGPQLRPASPRSGSCTLTLDSAAHGKNRIAPACN

SEQ ID NO: 33634 - protein, 32 aa, Homo sapiens
VMAAAICLVGINAIFSGGYCSLAVLQNWSMLA

SEQ ID NO: 33635 - protein, 56 aa, Homo sapiens
LLIWCLAWMPGLQALLVVALHSHPAEEDLLDWIFSGFLSDIVLYLPMKTLFFGLCK

SEQ ID NO: 33636 - protein, 26 aa, Homo sapiens
MLSWCCFLVAASPLRFHLELDVSYQI

SEQ ID NO: 33637 - protein, 14 aa, Homo sapiens
MVMVTQLECGSQAV

SEQ ID NO: 33638 - protein, 40 aa, Homo sapiens
MVSFPFHWLPAHMWKLFGKVPQNFGELCSPEVWRVRSERG

SEQ ID NO: 33639 - protein, 55 aa, Homo sapiens
LKLGGGGCSEPRLRHCTPAWATEKTKRKTNDEGLQKLKPRHVSAPSMWAWFCQCF

SEQ ID NO: 33640 - protein, 54 aa, Homo sapiens
MSGASSDRGLSCVSAARVLVGRACSSGARASRPDLGPRQGWKMMEEAEVEATEC

SEQ ID NO: 33641 - protein, 44 aa, Homo sapiens
MFLQKLKSCLVKAFHKMVCVWDQEDRRLLKKRTGTLTHFRLLHV

SEQ ID NO: 33642 - protein, 41 aa, Homo sapiens
MSTVKKMRGLLRSRLLSSLLLKAPLRLVSLFWRLCIRKLKI

SEQ ID NO: 33643 - protein, 61 aa, Homo sapiens
VPGLEDQEKESQVVCWRLEPRHRGAARLAAVGGGGGHCSAAGGVRYSCTSSGDPRMRGTRW

SEQ ID NO: 33644 - protein, 42 aa, Homo sapiens
LIEFLWCSLACSSVFCISCSVMFKLRNALCGSSESHLWFSRH

SEQ ID NO: 33645 - protein, 32 aa, Homo sapiens
VSHTQAAGWFPATYLRSLLLPWPRILTLLDNN

SEQ ID NO: 33646 - protein, 11 aa, Homo sapiens
LEATGQSRPQE

SEQ ID NO: 33647 - protein, 24 aa, Homo sapiens
MPPCAAPSPLSLASAWHSSTSSGS

SEQ ID NO: 33648 - protein, 109 aa, Homo sapiens
MSMASTPAATTWATRTCSWSGSASTTTRPLLTSTCLEPFWWTWNPEPWTVSAQGPLDISSGLTISSLVRVGPATTGPRVTTRRGRSWWIRSWMWCGRSVKTATACRASS

SEQ ID NO: 33649 - protein, 24 aa, Homo sapiens
VVSKGDWKKAEGMLASSCRHQVHS

SEQ ID NO: 33650 - protein, 41 aa, Homo sapiens
VAGSLCVLQIVTLMVAPMAWLEDKQIEDIGNGVIKMIDHEA

SEQ ID NO: 33651 - protein, 11 aa, Homo sapiens
MWSCSLPNVED

SEQ ID NO: 33652 - protein, 32 aa, Homo sapiens
LKTMMKSYIMIYLHLMNNSFPCKVIKVLPRRH

SEQ ID NO: 33653 - protein, 106 aa, Homo sapiens
KMSPAMSDSGAPGGGQPDVFSSKSGLSSQQAATSDGQQVLLCAQIKNPPLRNSKPLRVLGQQGGERWRRNMGFLCSDCRDLGKDQPYTMSISCPLTWQGSKAQPRR

SEQ ID NO: 33654 - protein, 23 aa, Homo sapiens
ILPPPSQAGLMSVLTLLPLLPGP

SEQ ID NO: 33655 - protein, 59 aa, Homo sapiens
TPRMHRLWIGPAFFLMTSLSVSGAVIPRNGGPGGVSSGPCLLQLLCGQAGSSTIRKIPS

SEQ ID NO: 33656 - protein, 51 aa, Homo sapiens
LLPCDLQVLGRAQTAKMPGHSRRWERHLSNLTLLPGPSVQMGLCFIAGPSI

SEQ ID NO: 33657 - protein, 63 aa, Homo sapiens
MEFFIPTSVDLKILPLSACLGSAVSSLPWFSDDACNNAMRFAHSWVGGDIGAQVWVSDCVTPC

SEQ ID NO: 33658 - protein, 54 aa, Homo sapiens
MAMFLAGCGGPLLNDLLPCCSEDTAARKGLAHCGASQGTLVAPASDLVLSLVWG

SEQ ID NO: 33659 - protein, 14 aa, Homo sapiens
MMGEKKRSHLCIPP

SEQ ID NO: 33660 - protein, 57 aa, Homo sapiens
MRNMGNYSLKKEMGFHHVAPAGLELMSSSDSPASASQSAGITSVSHHSCLYTSKGVE

SEQ ID NO: 33661 - protein, 8 aa, Homo sapiens
MLGDKDPT

SEQ ID NO: 33662 - protein, 21 aa, Homo sapiens
MPEARTLRPLLPFGAGGPAAA

SEQ ID NO: 33663 - protein, 23 aa, Homo sapiens
MPGPHARDSDGLGMGWSLKAGLF

SEQ ID NO: 33664 - protein, 61 aa, Homo sapiens [sequence omitted]

SEQ ID NO: 33665 - protein, 17 aa, Homo sapiens
MPPFGTTPLEFKETKTL

SEQ ID NO: 33666 - protein, 26 aa, Homo sapiens
MAPPRPPRSGNAGILLDKDVVIEVTG

SEQ ID NO: 33667 - protein, 60 aa, Homo sapiens
MQRDLLPTATKDCDSPDYQAGRVHFQLTSELREPFSTCLVSAITSVPQVVTFSVRSPFTD

SEQ ID NO: 33668 - protein, 109 aa, Homo sapiens
MKGTTWLQKSPLASASPGVSLSAQAGQRRHHNHRHPSNHSERPFAHAWSLLRPQYFSLRPARLARRGAFSLSAYFKTTPLLHARCPSLSPRCLPRPGTEAKFAPKPTVL

SEQ ID NO: 33669 - protein, 23 aa, Homo sapiens
MVTGASPRERPHARAQEDRNGEC

SEQ ID NO: 33670 - protein, 27 aa, Homo sapiens
MVFIAASALAEVPRAGSQGARVSQEHH

SEQ ID NO: 33671 - protein, 23 aa, Homo sapiens
MPRKDEDDRHYFGVLPTTAITER

SEQ ID NO: 33672 - protein, 113 aa, Homo sapiens [sequence omitted]

SEQ ID NO: 33673 - protein, 45 aa, Homo sapiens
MAARACRGAGASRKDTDQGMGDEACLNSEETQDLREPYNLKDEAP

SEQ ID NO: 33674 - protein, 61 aa, Homo sapiens
MRVGWGEQLGQGWGRPPSNLENSYSNRLLSSDGSAGRFLTGLRGRLGRKRMQPCSQPLAIS

SEQ ID NO: 33675 - protein, 58 aa, Homo sapiens
MTPTCLLISIVHWRGAREEGQRHMRSYYSLIPPLHLAEGMRTKEDRNQEKAKLLSLFQ

SEQ ID NO: 33676 - protein, 26 aa, Homo sapiens
MAYYSHTALSGSSNSVCSRQKCSVYL

SEQ ID NO: 33677 - protein, 60 aa, Homo sapiens [sequence omitted]

SEQ ID NO: 33678 - protein, 52 aa, Homo sapiens
METSCSLWVSSELFCRSVKVFFCLLALHLSALPHSSWTQDKNLGLAGMVELK

SEQ ID NO: 33679 - protein, 182 aa, Homo sapiens
MDDGKPTRAGWEGCCLAPLAPRWKRCNQNEEEKEKKCLKNHHGGSELQSEFRAAESWSAAGSARRSVRQRWERAPAPPGGRWTSESECVCARVSVGVSSRFLGMCVRGGMCWGYTRSRGNLSLTQAVGACESPPEIGREKSWRQSLEARGKEKGGGRKKRATHCTAEIHRPSQRQNLDWISS

SEQ ID NO: 33680 - protein, 64 aa, Homo sapiens
MTCQRPSLRSNCAAAGALSAAAAARAPRAPFGTHRSPPPAAPLSRSRAAAAVSPRRLGDAGHGR

SEQ ID NO: 33681 - protein, 104 aa, Homo sapiens
MAPQKLFLSPPDSGFGGWRARDAKGQWKIFYSTRNQARRWRFHCHLGVWGGGEPHLSGQSAPTRTCCWEPHTKGETPSTWPLDPQGVNLLGFCLSRFPLTLLTQ

SEQ ID NO: 33682 - protein, 105 aa, Homo sapiens
MRCEGGFPDGEKQMVPEWLGDRCNISVGGGHGAERSGLSGGSPVATVQDLGRRDRHGQDAGDTAWGIQHTGHHPAGKQSCSLRSPSTNSWHGQKVSQKHQKVPGS

SEQ ID NO: 33683 - protein, 42 aa, Homo sapiens
MFFNQSYTKCPCLSCLPSHFLHVFLSATLRQQDQPLLLSHST

SEQ ID NO: 33684 - protein, 59 aa, Homo sapiens [sequence omitted]

SEQ ID NO: 33685 - protein, 21 aa, Homo sapiens
MSIMTRVCPPPVPRSIPASIP

SEQ ID NO: 33686 - protein, 48 aa, Homo sapiens
MPRASAPSLSLAYSLGAPAPPATPGLPKRLLGRPAQRAVRSVCEEPQS

SEQ ID NO: 33687 - protein, 36 aa, Homo sapiens
MSSQQPRLEPTPWCWQRKPSLKGNCLKMLQKHEKCS

SEQ ID NO: 33688 - protein, 53 aa, Homo sapiens
MRGESSLGAEAAGCSVPGVMADEAACERVRGGPVMLKQCLPRPWRWVTSEAES

SEQ ID NO: 33689 - protein, 89 aa, Homo sapiens
MTHGCPEARIFSLPRVAPARPTRGPSWCGRGSWQGPGARVETWQWGWVWCPHRRVCREHSWMWQPQSQEERQDASSHAETDPGKKPAHV

SEQ ID NO: 33690 - protein, 34 aa, Homo sapiens
MGSGGRAGQPPGGRAGAGYLLTWEGPGSRSMEVK

SEQ ID NO: 33691 - protein, 17 aa, Homo sapiens
MLSPVHPINLGDKPGAG

SEQ ID NO: 33692 - protein, 35 aa, Homo sapiens
MVEKTPDHHLDHSYSCKGRGNPSLDPPQPCKTCST

SEQ ID NO: 33693 - protein, 4 aa, Homo sapiens
MRGC

SEQ ID NO: 33694 - protein, 43 aa, Homo sapiens [sequence omitted]

SEQ ID NO: 33695 - protein, 13 aa, Homo sapiens
MSAELWGHPSPGP

SEQ ID NO: 33696 - protein, 42 aa, Homo sapiens
MLTILTRIEEGGKMCVSLSWKFNQADFMGFFHTRRQYQKKWM

SEQ ID NO: 33697 - protein, 22 aa, Homo sapiens
MESRRCGFSCCFFFFFSEALSE

SEQ ID NO: 33698 - protein, 6 aa, Homo sapiens
MGPGGR

SEQ ID NO: 33699 - protein, 14 aa, Homo sapiens
MLLMLIVIGVFASN

SEQ ID NO: 33700 - protein, 20 aa, Homo sapiens
MREEEEGRGQREKRLSGRKV

SEQ ID NO: 33701 - protein, 37 aa, Homo sapiens
MEGLSTAGGETDVIYNHTIHGRSQVYNIQSSHIASAQ

SEQ ID NO: 33702 - protein, 90 aa, Homo sapiens
MEKQEPLRMDYGACSRKAGKRCGGAAAGVSKAGTGGVLTPCPSSRGPRTGGRGLLQAGRRSPAEQQGSWPAEGAMLCGTAGKSQTRIYER

SEQ ID NO: 33703 - protein, 6 aa, Homo sapiens
MAGPRG

SEQ ID NO: 33704 - protein, 111 aa, Homo sapiens
MKNTRAIILRTLLGLSPCSCLQDPLAFLSLAKGGGLCGLTTHTAAPVGLIQSVEFFKREKLKSLRRKEFCLQTVFELKTVASTPAGISSLLASSADSHLPASTIAAEAEEP

SEQ ID NO: 33705 - protein, 47 aa, Homo sapiens
MGNQPSSACTPLECILNHWDSVDPQTVEKEEKTFSLLCPLFQPGMTM

SEQ ID NO: 33706 - protein, 66 aa, Homo sapiens
MGTSSPPQPDGGQGLSKSQGNAQSFLTSGLRTLSISLISNLICGKSKEHLLLKIEVFWAGCGGSFL

SEQ ID NO: 33707 - protein, 18 aa, Homo sapiens
MRILRGPYAALFAAVLTS

SEQ ID NO: 33708 - protein, 45 aa, Homo sapiens
MSWFSFNGGDSICVCALLEDLPLYQMKLGKDNVPKSIQAQKGISV

SEQ ID NO: 33709 - protein, 26 aa, Homo sapiens
MVFLTWLSCISLTLTKLVQHLPWATC

SEQ ID NO: 33710 - protein, 36 aa, Homo sapiens
MEVLFDSLLFSSFIFPSQSLLSRTSAFSHKPNGLSE

SEQ ID NO: 33711 - protein, 161 aa, Homo sapiens
MSSHLPFYVTCARWLLCLQTSHLHSRQKGEGKSKRCVPNKSILKTNKGRGSRRKFKKKKKKNKNRKAVVSLKAPSSRLLPVTHYPVMWPPLDSRQSEEVSVSKRHMDATDKIKFPWLKEKRTIEFGEAAGYVCHRRYKDMEPHEKMGEAAKKVHWVQVRSR

SEQ ID NO: 33712 - protein, 55 aa, Homo sapiens
MVFPAKPEAPSLLPLFSLVSFSGWPEDETPQTPHFLALVPGLAGPGIHLHCVGCP

SEQ ID NO: 33713 - protein, 30 aa, Homo sapiens
LPSFVVSQRCAGLLLAALRIQGVGCQVQVS

SEQ ID NO: 33714 - protein, 32 aa, Homo sapiens
RQRFLGFCLVLSLQKVLPVPPALGTRLCIASP

SEQ ID NO: 33715 - protein, 25 aa, Homo sapiens
MIFGCTTELFQKHLGVPMISTSKEC

SEQ ID NO: 33716 - protein, 44 aa, Homo sapiens
VTFIFFLVWICLLMHLFQNPKLHKCVNILRNKMNPTRRMIFSHT

SEQ ID NO: 33717 - protein, 33 aa, Homo sapiens
LAFLLSLISLFQRRPNLKSFPGSGSVHLIRQPK

SEQ ID NO: 33718 - protein, 18 aa, Homo sapiens
ICSRRRLLLLPLLLPLPP

SEQ ID NO: 33719 - protein, 15 aa, Homo sapiens
VTQVWGMMVTLLTHV

SEQ ID NO: 33720 - protein, 28 aa, Homo sapiens
LSPRRSLLPVLPPLCSVLVSAFIPEWIW

SEQ ID NO: 33721 - protein, 45 aa, Homo sapiens
MRNSSMRVTASRPPSTIFSPSCLSTSLSSSRKLPTLTSCSSSFCS

SEQ ID NO: 33722 - protein, 93 aa, Homo sapiens
KGSGRRTANREALGSWLGQQLHLSCLCSSGHLLMLRGSPPFQRLVPLSWNLAWAYAEAASTPLSQGLGGSIAPTPAAFAHGWPCPPLAQPKSH

SEQ ID NO: 33723 - protein, 20 aa, Homo sapiens
LATLLLLLLLLLLQLPLHSR

SEQ ID NO: 33724 - protein, 34 aa, Homo sapiens
LAGVDARAGLRPLLAAVNSFGQLMIFIIVPSFYK

SEQ ID NO: 33725 - protein, 42 aa, Homo sapiens
LTEAASGRTFWLLTVLLWFSRIVCRCEINHEFRCSFDPREFC

SEQ ID NO: 33726 - protein, 16 aa, Homo sapiens
KCLARNTVGTSMILLL

SEQ ID NO: 33727 - protein, 28 aa, Homo sapiens
LLVLSLKKILQSLLILFLGVTIFEAKLT

SEQ ID NO: 33728 - protein, 44 aa, Homo sapiens
LLLFWKMWTSTKWFHWKQIVVLTMHPFPQALNSQQVPTRMMMSS

SEQ ID NO: 33729 - protein, 56 aa, Homo sapiens
RRVCVLAFILLSWEPTAGGSFSGSLGGRWMGSRGPRGTGPGKRRRRRRRSRSPGEA

SEQ ID NO: 33730 - protein, 80 aa, Homo sapiens
IRKPARRKIQTTNPDFLLLLFMSVPVVSAPPFCPPAEGSRDGRPKASVARPAAVHEHHSPRDCGHLPDVLRSSLGGWQPH

SEQ ID NO: 33731 - protein, 11 aa, Homo sapiens
ILLYFVNIFFF

SEQ ID NO: 33732 - protein, 38 aa, Homo sapiens
ISFISGLCPLGWKGQDSAAAFAFLFLNFIVLISFLPNR

SEQ ID NO: 33733 - protein, 66 aa, Homo sapiens
MSAAGLSSPCPTFLFSSLVSPTLLLPQAVPDAEFRLSRLFLVPGKAERRSSNGLVLRASGENQRSN

SEQ ID NO: 33734 - protein, 33 aa, Homo sapiens
MAHRSLGLLGSSDLSTSASSIAGTTGTHHHPQG

SEQ ID NO: 33735 - protein, 20 aa, Homo sapiens
MLTKQIFTSAKLKLCILLLT

SEQ ID NO: 33736 - protein, 22 aa, Homo sapiens
RALTAILWKPPSSLAQASVVAP

SEQ ID NO: 33737 - protein, 110 aa, Homo sapiens
LRLGLSLILRSARERSSAAAGRKQFCKNNHTQPGNCLPLGLSLSRRPHSLQGGGHRIYRGKTSLPASRLQCCKLRISLDFVFPGNCSKTQNHICREPDCHGIRGAGHSYL

SEQ ID NO: 33738 - protein, 62 aa, Homo sapiens
LAGWLSAALRCAPAAPAARGWGCPAEPRDPPPSARTRTDKLILKVAVVLLLSKNGGPTGESG

SEQ ID NO: 33739 - protein, 28 aa, Homo sapiens
LLAHHPILASLLLHLLSLPSPLPRKPPI

SEQ ID NO: 33740 - protein, 87 aa, Homo sapiens
LGVSPGAALLTVLPVPAVARRSAGPAATLATDAGRAATPGSWPPRRLRPPWPSGPQAPPRHPPRTASSARGSPAPCSPSSSWPGSCA

SEQ ID NO: 33741 - protein, 63 aa, Homo sapiens
MSYLPTNPPGSILTCWLGVSLGSHRSARGGSTIYGRLLPRRKDVWFSQAKDVPKYRGLLYLQS

SEQ ID NO: 33742 - protein, 20 aa, Homo sapiens
MDPQRRFLVASLVAGVCIET

SEQ ID NO: 33743 - protein, 43 aa, Homo sapiens
LCFQPPRQLLHPSVIARAWGKTRRQERLTSSGFPRLIPEDKAR

SEQ ID NO: 33744 - protein, 63 aa, Homo sapiens
VDFCFVILTLAVSPPARRRAWLLVAIRKQQPFHLSFLHSGICSRAKGGRVLKEGLMSSSFSNS

SEQ ID NO: 33745 - protein, 69 aa, Homo sapiens
VDFCFVILTLAVSPPARRRAWLLVAIRKQQPFHLSFLHSGICSRAKGGRVLKEGLMSSSFSNSCKLCVG

SEQ ID NO: 33746 - protein, 102 aa, Homo sapiens
LMPSKTEDPFCITELWIICGSLVISHLHSLLQSLNTYLGSSLPYLVKDGIQPDLYWSNLGFAVFSLCCHLLRGVLYALLALGITAGQACVLRYLPEVLISCA

SEQ ID NO: 33747 - protein, 52 aa, Homo sapiens
MRYLTGFLYNCFLPPSKLTAREKFSCLIYLKPNGLQWIIHLLGIFLLLFKAK

SEQ ID NO: 33748 - protein, 47 aa, Homo sapiens
MSVAIFLPFSVPLRRKNLTENTKKKKKKKKKKSSYHCLFCELFVLVC

SEQ ID NO: 33749 - protein, 43 aa, Homo sapiens
VVAVFSAAVTVIVFASLAKTSALDQDGGWTAFLTFTGPGGADA

SEQ ID NO: 33750 - protein, 46 aa, Homo sapiens
LLPRVLSHLAAAAPVQTLTLPPKAQPSPNNPQPCTDVGCESLCLSD

SEQ ID NO: 33751 - protein, 84 aa, Homo sapiens
LRVGLDARAAAQRLNRCGPPRPPLPTLASAVSSLASPTFLLLCCLRFWSSAVLAARPEESPRPPRSRFPLARSRRDFGTVSPSG

SEQ ID NO: 33752 - protein, 41 aa, Homo sapiens
LTLSQCQVSKCLLNDHRRLVLVVGVWGSVLVIWMLVIGVQY

SEQ ID NO: 33753 - protein, 68 aa, Homo sapiens
VCACARVCVLGVCVLGVCRGAERRAGPRGRKEAVELPGLGLRLPSSALLPRRRRCCSRCLWPIANGWF

SEQ ID NO: 33754 - protein, 43 aa, Homo sapiens
LRGAGGGAGWGQRWLRLLALGSACGRALAQSRLIAAVAPGATG

SEQ ID NO: 33755 - protein, 124 aa, Homo sapiens
LSFLTPSQSCGKGHSLSLSFLSCQPLRACSSGSESQWERARFAKPWAPGLGAPLPDPSGHGRGEPRGEEPRGGARARGRRQAALAPSRDALSFFLLFLLLPLFASPANAVGAARRSGAARDRAT

SEQ ID NO: 33756 - protein, 80 aa, Homo sapiens
LRPSRAESTRHSRTSEASRPRGTPPRRPPAGPRPLFPLVAATGALQGAAPACSAPDLSAKGSLCQRDFIHTDEPRIGIAV

SEQ ID NO: 33757 - protein, 38 aa, Homo sapiens
LNLSCRFLICHTCASSEDSFFVVVFFCFFFFGRCMTCV

SEQ ID NO: 33758 - protein, 31 aa, Homo sapiens
VSRLSPRRSLLPVLPPLCSVLVSAFIPEWIW

SEQ ID NO: 33759 - protein, 68 aa, Homo sapiens
LCSHMFSLSLSLSLSLSLSLSLSQAGHHSVISSNKTSQVPKTFNSKRNPPSPRQKRRSHRPDGVEWTL

SEQ ID NO: 33760 - protein, 43 aa, Homo sapiens
MQVGSQPVCSLSAPPRPAPVTALLLYHLCLTLSGFSIEWLMCM

SEQ ID NO: 33761 - protein, 161 aa, Homo sapiens
VCAYFFLSFLSLSLFFPLSLSPSLSLFFFFFFAKKQQRRRRSAEALRPPGGEAEEAGSGGGRGAGEGGAALGGRQRARCSRAGREAWRGPRPYPRRRRRRPPPRRPPPRRPPLPRTTKSGSWTPSTRCARARRGRTWSASAGWCGGGTARSRSARAPSSRN

SEQ ID NO: 33762 - protein, 15 aa, Homo sapiens
MGFFLFYLPVAVLPI

SEQ ID NO: 33763 - protein, 68 aa, Homo sapiens
LARTRPLARSGSARLPGRGRRRNSLGPETPRLFCGPAPGRCRRTLEKEEEDLSDSTGDGSLPLFIVAS

SEQ ID NO: 33764 - protein, 42 aa, Homo sapiens
LARLPGSRALAGWVLGPGAPAPALTARLCAAGAAQPCCAACW

SEQ ID NO: 33765 - protein, 45 aa, Homo sapiens
LELLICCAIAIFPRAALSLDLAFQNCNSKMCKTGYSLLCCQGTWI

SEQ ID NO: 33766 - protein, 58 aa, Homo sapiens
VPSRREKGRSLCGVCCVHICFVPHTCSSCLGAYQVPSPVLGAGSTAVSKGDNIPCSQR

SEQ ID NO: 33767 - protein, 35 aa, Homo sapiens [sequence omitted]

SEQ ID NO: 33768 - protein, 28 aa, Homo sapiens
LDHSGKLCWLGVGFCLPWGTLLSVDHTS

SEQ ID NO: 33769 - protein, 118 aa, Homo sapiens
LGAARRRRRRVAAREAREAVAEAQAVAAAAQEAADGELREQARPGSLAAAWLQHARPPGAAAAAAPLAARRALLLFSLVLAAVLRLCGARHSEHLPLHDASPRHSDPGQRENNRCSGL

SEQ ID NO: 33770 - protein, 30 aa, Homo sapiens
LQQENFHLALLALILTGHQTRGTEGREDAR

SEQ ID NO: 33771 - protein, 38 aa, Homo sapiens
LGIGPVDFLLRFPLSFLRIEVLLFFLMPWLCEFESKQL

SEQ ID NO: 33772 - protein, 105 aa, Homo sapiens
LTIGFHLARTFYVALLLWPMCCILCPQCATGPQRNVCLSNHGSGAVWQECKSGWRPGSPPGALHPPSRRTQQHDALRRSHCVQAPHLPGTALLRVPPSRNEGVHP

SEQ ID NO: 33773 - protein, 133 aa, Homo sapiens
LGPVCATGVGCPASGLLLLLVLLRRPAASPSRAGGESGCGFVLTVIVAFPRLGGLRAGLLLLRERAVLSDPTPSRGSPHTLGCVRVEWDPRTRVSLDSYGAERTKIPDGKLNEWQKPWWSRRKSPKRSNFGYY

SEQ ID NO: 33774 - protein, 44 aa, Homo sapiens
MVADKEVQTRTLLLSSLWIVCCLHLDSLISKNILSMQLGDIYRR

SEQ ID NO: 33775 - protein, 138 aa, Homo sapiens
LPLLALPARSRLLGCLWLGSAILSPTLGHCSASLPAGCPRSAPGPGEPSGRASLVVVEALAIINDRGYNDFAVSAGSHHALLLAETRDAFPAVHQLGSMELLLPHRRGEDHREVQPGRREDGEGQGSRDHAERSTRGA

SEQ ID NO: 33776 - protein, 28 aa, Homo sapiens
MEPKSRSYASPLLYSQTCRTLVTREMMG

SEQ ID NO: 33777 - protein, 43 aa, Homo sapiens
LAGVILVFAPSAFDIVQQRNGYGEAQSAACRAGVCEAILYFAE

SEQ ID NO: 33778 - protein, 44 aa, Homo sapiens
LAKLALCAGAPGLLRLSSSRPDFTPGSATGAWLPPNPIVQRRHP

SEQ ID NO: 33779 - protein, 76 aa, Homo sapiens
LASPADFRFPSAAFGGRVSRLFRSTAEVAVAVALVAAAAAAAAALERFLSGSAGGPPGWSTCKSRSGAPGIDGDEL

SEQ ID NO: 33780 - protein, 35 aa, Homo sapiens
LGFFYYFFFFRTTLGLLFLCSTFPPFFPPSCAAAF

SEQ ID NO: 33781 - protein, 14 aa, Homo sapiens
LLLLSFLVLGLHIC

SEQ ID NO: 33782 - protein, 52 aa, Homo sapiens
MLRAGDPQDKTKEPEPHPLIGFAWGGGVLSPLIFSSGRDGPKASPAIIRNDS

SEQ ID NO: 33783 - protein, 48 aa, Homo sapiens
VTSLARPAGAILKVESPAPAAAAAAVAVVVAAAAAGERARAGKPQSEI

SEQ ID NO: 33784 - protein, 44 aa, Homo sapiens
LFLSLLLSLSLSLSFFSALAGAVLEERKKERQRIAFIRYVLEIS

SEQ ID NO: 33785 - protein, 66 aa, Homo sapiens
LLLNLVKEVTYTERVVRAVLSGCLGCWLLSSPFLTHLYIILRWCSQSLKGERIKKKSRKRFTLLFL

SEQ ID NO: 33786 - protein, 99 aa, Homo sapiens
LLYIWHKIRLTLLKILRDKLPFAKCILSAFRNVDINTPRSPLTFFLFLFFFLTLFLEGSIVFGEIFFLYFVLLFFFFNFYSLEEEDLPTSTRWVLSKGR

SEQ ID NO: 33787 - protein, 107 aa, Homo sapiens
LRAPEAAVAGGPPDFSSRPVLERLTGPRPAASLSLALRGLGDWAAGLRVRGGGRLRPGASWPREPRDGGPGRGGGAAGVSLGGEGAAGPARFPARKLREAWTSAHWR

SEQ ID NO: 33788 - protein, 128 aa, Homo sapiens
MYMCVCVYIHTYTYIRACVCVYIYMCIYIFFEESHSVTQAGVQRRDLGSPQPPPPWFKQFSCLRLPSSWDDRHVPPHPTNFIYLVETGFLRVGQAVLKLLTSGDLPASTSQSAGMTGMSHCAQPPIFL

SEQ ID NO: 33789 - protein, 131 aa, Homo sapiens
LRHRFFLAAVAACGGGLPTAALCSLRLSPAGSVNAAVAALCTQPRSPLLQSGSQSLSTIFYPRAAWIVVPSVRTPLLGPTTAASDISVSLFLWRFGLPISVVATLGVYGPLKNGRVREPQGAVRIQSRRGW

SEQ ID NO: 33790 - protein, 77 aa, Homo sapiens
VRARRCGFFSGLRRALLLVPALAGTRFLFASFPSARRRPAAKTRWAAPPIEITEDIRVLLKRKRGHLRTLLSASKDY

SEQ ID NO: 33791 - protein, 71 aa, Homo sapiens
VRARRCGFFSGLRRALLLVPALAGTRFLFASFPSARRRPAAKTRWAAPPIEITEDIRVLLKRKRGHFSFLS

SEQ ID NO: 33792 - protein, 20 aa, Homo sapiens
MCILWTWAWLECSGVLKILL

SEQ ID NO: 33793 - protein, 88 aa, Homo sapiens [sequence omitted]

SEQ ID NO: 33794 - protein, 117 aa, Homo sapiens
VSVPFHFHFCSLACVLPSARGKTYPEDFFRRGWGGAAGEPWPKRTMLGTVCVPSAAGHQKATWVPGALPLAVGPPPPLSGFPRNVQPRRPSQSLGRVMSAGPDRRPLGTLCCFVSFL

SEQ ID NO: 33795 - protein, 61 aa, Homo sapiens
LPGLGPCHLLPQVSAIHQKGSLRVWARDLLLLALLHGPAMLSKPLFAAFSSSSSPDSINKT

SEQ ID NO: 33796 - protein, 96 aa, Homo sapiens [sequence omitted]

SEQ ID NO: 33797 - protein, 38 aa, Homo sapiens
MYLNVYSLTWIKHEQARGVLCRWLLVLVIIGCMMGQGR

SEQ ID NO: 33798 - protein, 54 aa, Homo sapiens
LPLPRPPIPHFWAVMLLVCPLHWGWLGWKVGWTSAAFLPPMAAAPLALTVLGRG

SEQ ID NO: 33799 - protein, 46 aa, Homo sapiens [sequence omitted]

SEQ ID NO: 33800 - protein, 95 aa, Homo sapiens
LLYKKLSLNLKHNLEGRCLLLKALLIHLTQVLSQQSHVPYEHRGFISFSYTTDPNMPGAMGTPALGEADVVIPRNSCHSGPDGRQEGLPCTAFLG

SEQ ID NO: 33801 - protein, 56 aa, Homo sapiens
LREEEEEEEAAGGGAGGGGGDQEVQLGARELHPRGGGCFFFLSFFFLFLFFFFSNS

SEQ ID NO: 33802 - protein, 114 aa, Homo sapiens
MIVRLPQARGTGRSRKRAVLHNKRKNCLNGGVSGMSHRPGVEEESVKQGTGTSWDVGSSRSPARRTSHFLSRTPASLESDAPTVWPRQPDVSHHTGRRSCYRKTSDFASSRWLF

SEQ ID NO: 33803 - protein, 43 aa, Homo sapiens
MRRRRSAVGSVSARGCGGAGGSSLSGFSLGGGGGGSVDASSAS

SEQ ID NO: 33804 - protein, 29 aa, Homo sapiens
MEIDLENKVSTRCFVVSVFLLFTLPESVL

SEQ ID NO: 33805 - protein, 76 aa, Homo sapiens
MGREWSIPVLVVQVGISEEIAVIPRLGPPGGAAFPSASPHTTHPAAVIPLTELFFILTLIPGGLKAKTAQRGKIES

SEQ ID NO: 33806 - protein, 59 aa, Homo sapiens
LVSGFESSGVPGRCVTLGQSPNLSGLELPHNNTNTSAARSAGGTMRAMRPAQVPGTQLM

SEQ ID NO: 33807 - protein, 108 aa, Homo sapiens
LRATRSIFSFHMKNLSPGVICAAKDTQQVSGCTRNSTHCLRQSLPQSTLSPPQGLVLNHSVVSCLLFFFFFWRQGLSLWPRLKCSGVITAHVAWTSQAQAILLPLPPK

SEQ ID NO: 33808 - protein, 232 aa, Homo sapiens
VSPFAPPAPSASLPQTQTLPREASQRRGQKAATQSRHIPRLGRRHSPQTPWTPAVYEDARGTAWFRERAPKATCRPPAPGRAPSACRNTPLHPARDAELRENLVQRGLNARAPPRGWSLSRPHPPGDHRAASPAARRQKLEKKKKKKKKSSWGLGTRLLAPLNSPRLSPPSPPVMNPVKGDRPGSPRNIYSCDSHKMEKGLNFCFFKELVFCVCVYTASSHQPNCLAPLQLR

SEQ ID NO: 33809 - protein, 73 aa, Homo sapiens
LGEELGVMLFSKLFFGSSGERDRARCGRAGRGHPAGDPAGGSGRAVQDEPPVPHPRRLLLPSPHVSPGLLQLQ

SEQ ID NO: 33810 - protein, 37 aa, Homo sapiens
LGRNSSVHCCCCCFWCFAFQCQLSTLYMIRFIHITLL

SEQ ID NO: 33811 - protein, 27 aa, Homo sapiens
MGWTFCFSFNSLFSFSFLLNLQHLASR

SEQ ID NO: 33812 - protein, 71 aa, Homo sapiens
MTTDSLLMKRRPKAQVRPSRNSSAMAPSAQDLGVGRQGSQSTRRRGRPQPRPPLQPTTGALGWAWALSAKP

SEQ ID NO: 33813 - protein, 46 aa, Homo sapiens
MLNHLTQSGSNSHAFGKGTSVLCGSVSRPNFPFGTDAVVHACNPNT

SEQ ID NO: 33814 - protein, 99 aa, Homo sapiens
MTGWSLLFKFQIDIPDKRCLSPCLSSDLHSTVPGKVEPPASPCPGGWKCKRKVSARSFFSESSLLGLQMAACSWHSLFSTHAQSYGGPSNHLLQPLETS

SEQ ID NO: 33815 - protein, 36 aa, Homo sapiens
LLEGSNQPAPLALLLVCAAFQRLPISLVIYFYICFL

SEQ ID NO: 33816 - protein, 68 aa, Homo sapiens
LERGVSWEGVGPACLSVSGGCCLLWRQAGRWRPRLAGVDARAGLRPLLAAVNSFGQLMIFIIVPSFYK

SEQ ID NO: 33817 - protein, 113 aa, Homo sapiens
MKLLAKVTQHSHILLNIILFSGWNVTIAQVGIFVCFVHCCTPSPQHSACPGQVPSKHLGSNASVLPAAPANRPPTQALPSASTATTAAHLCWHRSLFPGLPEIPSPHSARGSY

SEQ ID NO: 33818 - protein, 30 aa, Homo sapiens
LGAEGSLGLWAAAAAHSALAALCGDRRPQT

SEQ ID NO: 33819 - protein, 109 aa, Homo sapiens
MLSRGWLLLVQVLPPTPRISARLCHGGQRPPRTKGPCLGVRVRAEGAGASRISLNTSWLGPRRLKNTGLGWSWHLLTRKGIAEIQPLQPPSVHRWLTFSPTICFLLLKG

SEQ ID NO: 33820 - protein, 54 aa, Homo sapiens
LSGLLCVLGTLLCATADPVVHQPPDPHLCLLIQCGHQLGLCQQLPQPLCVHRAL

SEQ ID NO: 33821 - protein, 116 aa, Homo sapiens
VGPSPTSRFFLLPSCCFGLATPSPLVPLEACPALILPMPSTARRLAPISTLGRGQVGQGWTSRRGVRLCSLPPASTERSHGFRYLPPVLFLLQPQFHQVSGLHGGLGQAEESGQGP

SEQ ID NO: 33822 - protein, 27 aa, Homo sapiens
MYVLSIMCLILLLSHPEAPSFVWTAKN

SEQ ID NO: 33823 - protein, 42 aa, Homo sapiens
MTLPFPGHPGSLWRRSHRCSLMSSLWSQLVPVAARRQKAVSE

SEQ ID NO: 33824 - protein, 76 aa, Homo sapiens
MHKKGSPILGSHTARVAGTSPPALPLLAQLPDASAEPHGPRHALRRPQQSPAPAGGAAAPAPGGRQPARSRSVRGH

SEQ ID NO: 33825 - protein, 54 aa, Homo sapiens
LAPAFGESGVWRLVVVISSDCFAVHGFSFCPVGLSAVCASLCPPPLPPAHLCLR

SEQ ID NO: 33826 - protein, 144 aa, Homo sapiens
LAGLLLVFPLLVALLGLGLVWEQTCFISTLPSTSGAVASTARGGRGAHPAQEQRSGGEETASLLTGPLCVTKFGKNMDLSQSFHVCSQLPAEKAKGSLPGKETGRKIKEFGELDLKCELKIKIKPGHIPVSKAKPTLSRGRLSI

SEQ ID NO: 33827 - protein, 22 aa, Homo sapiens
VCVCVCVCVCVCVCVSLCLCIG

SEQ ID NO: 33828 - protein, 82 aa, Homo sapiens
MPAAVMSPRRRWLFGGSEERLLLLLLLLVAPLQNEPRRQSPFCQLRGGARFGSAVLMARIYRSWREDKLSSGCLRCIAVLEY

SEQ ID NO: 33829 - protein, 16 aa, Homo sapiens
VFLGVLLSLWIEPVKP

SEQ ID NO: 33830 - protein, 124 aa, Homo sapiens
LRAGSPAPGRERGGRHRHRPGVRRRSCGRAGGHQLGQGLLGAALCGAAAARRGAGFSQAPRGRVANGAAAGAERDRFAVAVAAACVPGAGGSAASLAAHRAPRFPLSRAGGFSEFSGGETDWSG

SEQ ID NO: 33831 - protein, 19 aa, Homo sapiens
LTCLAPAALSCFLPIVLAP

SEQ ID NO: 33832 - protein, 69 aa, Homo sapiens
LPSAAGRVGSPWFRPAPPSWSPFSRWAGLSGGDCLPGLAIGLLMMFDPAAGIAGNVISKLGSASVSSLV

SEQ ID NO: 33833 - protein, 27 aa, Homo sapiens
LELNFPTAMLRNSTLHVFVLFFGVFFN

SEQ ID NO: 33834 - protein, 85 aa, Homo sapiens
LILVPDGAFGAGRNTQRTNDRTFSAPFLAPVWFALSPSTMTALFGCLSPGQLLLSFRCLFANNHFLFCVPFKRQIKSTSVFLENS

SEQ ID NO: 33835 - protein, 26 aa, Homo sapiens
LTLSTLEFRVAIECQLWRWGAYQIYK

SEQ ID NO: 33836 - protein, 61 aa, Homo sapiens
MIPKPCCKFLHWHLWISVLMFVLSDLTFYFLSFLEIADCSAPSTDIYINSYSFPLPSLNSF

SEQ ID NO: 33837 - protein, 35 aa, Homo sapiens
LAALILVRARLLLLGWVCIIPITPSGKRSQPPFKP

SEQ ID NO: 33838 - protein, 14 aa, Homo sapiens
VIFLIFLLPKIVHH

SEQ ID NO: 33839 - protein, 34 aa, Homo sapiens
VSSSPALTPWFLPWLPLVSTLAQPTPVCPSPSCF

SEQ ID NO: 33840 - protein, 25 aa, Homo sapiens
LFCLLFVVCFFATNFSIHSALLDKS

SEQ ID NO: 33841 - protein, 69 aa, Homo sapiens
LAKWFQATRLVWHGPVFCLLLRRVAAGTVGRAASGTAQVPARRSRAAGNHCGKSSQLFQTSETIIDFVQ

SEQ ID NO: 33842 - protein, 16 aa, Homo sapiens
LCYLTLLLLVMLQTGK

SEQ ID NO: 33843 - protein, 83 aa, Homo sapiens
LGRPCFSPDGPREGYQRPWCCHLPLLKCLPGAPGAVLANAGNIHFPAASWVLLSYLCLFSGGLGTISGDLGCADSKDPLWQEP

SEQ ID NO: 33844 - protein, 91 aa, Homo sapiens
LASFFADGSPSSQISLPVHQLFLPHLSPLLHPPVPAAKAWAFPPSLLSRCRAGTPYGLVSPPQSLAYPSESLILFLLLLLLLLLLLLSLKL

SEQ ID NO: 33845 - protein, 137 aa, Homo sapiens
LAWVNSSVTLALLGGDARPLAWVNSSVTLALLGGNAHPLPWVNSSVTLALLGGDARPLAWVNSWMTSALLGECAVPALPPPTSGAEARPGHPSAWTPLEGEGASLSRWAPLALPSLSLHTGVGWRRPQASYCKSFLF

SEQ ID NO: 33846 - protein, 77 aa, Homo sapiens
MGMRLGGRILSSLPPHSGVWLQPSLAPAGGREGAGSPSGLQGQVQGSPRMGFPGGGGWGGVLFLVPRGGAAPSHFIQ

SEQ ID NO: 33847 - protein, 86 aa, Homo sapiens
VVPVPAGTGLGLVRPWGLRLVFLCLDLHIYCIAGRDPQACPPCQDSSGSVWVPHSAPISPMSPAGAGSHPSLLAAAPSRPGIGSAR

SEQ ID NO: 33848 - protein, 35 aa, Homo sapiens
LTHVYLFSGGISAGDFRAPVEVAMLTPSPLRGTEG

SEQ ID NO: 33849 - protein, 94 aa, Homo sapiens
VGRPRPAGPPRTQVLWVTVPVPAPPLLSAPLWLLRLSPLLSHLYLHPHRPDAVAPGPSRAGGGISPQRNGGACWAWPPGPPPLSRAKRAQGYNK

SEQ ID NO: 33850 - protein, 36 aa, Homo sapiens
VTETQSIPKWAVTEVVDHTVKLKCEGKAGTYWKLKI

SEQ ID NO: 33851 - protein, 65 aa, Homo sapiens
LGRVSHAKLGGESAGLTPSSSGRRRQVGTGRVAHHRRGGRRSSLIVPGAVTTMRPFLLFLLHLSL

SEQ ID NO: 33852 - protein, 72 aa, Homo sapiens
LWLALVRSVVFFPGVFLLISFLPGPSGARDRHHLPERGCPRCQALGSRLSGWPGGRRGDVGGPDVCLERPRS

SEQ ID NO: 33853 - protein, 10 aa, Homo sapiens
VAAAAMLLWL

SEQ ID NO: 33854 - protein, 25 aa, Homo sapiens
LRPRFLTKLVLLRVFLHDLTAVDSR

SEQ ID NO: 33855 - protein, 7 aa, Homo sapiens
MSLVLLL

SEQ ID NO: 33856 - protein, 61 aa, Homo sapiens
LSTSPCGEETSVAQAPELILAWAVTYWGMGLLFVLAPKWSGAPGGVRGGGGPSNGGTLSHG

SEQ ID NO: 33857 - protein, 180 aa, Homo sapiens
MTTTSYMCLLQIVRAGSAGCWPLKKKRGIITVWCLNIILISGWMGSGGAVLSWRSLQQAVPNMIQPRMLQRSLFLLLLKTTGDHFGNLKKLWSLPYMTTKPMILRNSHCGATKSTACWTVLRFTGGESRTGMGMKDMYQAVIWWKNLQIIWKPMSGTIRVSAETKLKNFFWTQAKKEPSW

SEQ ID NO: 33858 - protein, 120 aa, Homo sapiens
MKGGILPPFLCLCLVLLSLFPSDHFGNLKKLWSLPYMTTKPMILRNSHCGATKSTACWTVLRFTGGESRTGMGMKDMYQAVIWWKNLQIIWKPMSGTIRVSAETKLKNFFWTQAKKEPSW

SEQ ID NO: 33859 - protein, 91 aa, Homo sapiens
LCPLGKCWCFRVIGRHSMFLLLLLAAAIFVIIIFYVRCCKKKTSAAEGPELVSLQVLDQHPVGTSDHRDATQLGFQPLMSALGSTGSTEGT

SEQ ID NO: 33860 - protein, 99 aa, Homo sapiens [sequence omitted]

SEQ ID NO: 33861 - protein, 76 aa, Homo sapiens
LGLLGPGRVFWMGLGCSLVAGPPRSGPACWGFEEVECRVEVLFTRVLGTVPGTLRQAPRPAGPAGGARCVCTFQSS

SEQ ID NO: 33862 - protein, 63 aa, Homo sapiens
LLWGICLFSLFFLTSISMYVQRLKNNLERVHPSNSSSLEISASLRLRLYSTSSDYTTTINLLL

SEQ ID NO: 33863 - protein, 92 aa, Homo sapiens
LPRFLVTEFLELSHCSNCCDELCLLCVGFQTVAAVTTAGRQHDQQLPRQSLASESCIALMLKPVGACWRDTWMFSELVTLLVMSLIFWPEGD

SEQ ID NO: 33864 - protein, 42 aa, Homo sapiens
VLEVTGAAATAAAAAVAALSAVAAEAAARPRAAQRTITGLGT

SEQ ID NO: 33865 - protein, 37 aa, Homo sapiens
LWHFASGLPSLLVTLLPLVVTDSWEDPPCPSLRFSKT

SEQ ID NO: 33866 - protein, 109 aa, Homo sapiens
LLLMPVLREDTELHLFWDLLWGRMVDSGILETCLGPPRVKATQHSRRAPEVWKLRRVIGITPTVDRGRQGVRINCLRVGESEMWGPYSAPRPGTVFLSSFLSPASEEHL

SEQ ID NO: 33867 - protein, 201 aa, Homo sapiens
VPPQRPSAALCPSLGPAPALAAPLPNETGRDDQEDVPERLGAEYPGQELLSHGHPRLVQGGQDGHRVALPHRPLRGRLHAYHRGLPPQVLLHPRRGLPARHPRHVRQPPVPRHAAPLHPHRSSTPSLASRTKPRRTWTCPWSSAATRVTATSTARWTSARSSSWWATTPSAAPTSRSRPRRTAAWTRCSARSSPWPSCPAR

SEQ ID NO: 33868 - protein, 53 aa, Homo sapiens
LELQVPWVPEVPQVPLERMEMMGKLENLVVLVSVGLLGLRVLEDCPEQLASLE

SEQ ID NO: 33869 - protein, 40 aa, Homo sapiens
LVVRWAVLVFRSSTAALPRAAEAARRSEKWPKTSALGRRS

SEQ ID NO: 33870 - protein, 45 aa, Homo sapiens
LLLLLFLVFCFSVPTQHIVYDSVYTYYLVIMKKLILRTLKCYTQC

SEQ ID NO: 33871 - protein, 173 aa, Homo sapiens
LQAAVRLAACSPCPGAPPGARARPSVFLPVPPALPERWPPCFCADHAPGPPERPAGPGRGTAGTGRSPPPSAARQCTRLVDFAAPGGAFPGGRGRREAASMHFMWRLLAPPVASCSAGRPAPSGGPAADQLAGVETRLLTPPCMQRHLEAARPLWFFVWLVPFSFFLFFFKKK

SEQ ID NO: 33872 - protein, 35 aa, Homo sapiens
LSPTSCPADLLVTPLLAAHAAGTGAAEKGAPSSGK

SEQ ID NO: 33873 - protein, 90 aa, Homo sapiens
LTAPTLALLLLPKISCLLTSTHPRTQGSRAHFPRAWRLDPGEFLHPLQDPHSSPLWSLDHRWRWPELTCWLWGHSSCWPRMRRGTREYKG

SEQ ID NO: 33874 - protein, 43 aa, Homo sapiens
LQKHIFHYGGPPAGLALTGSFVTLQMSWSVSFFLQEALEPGSA

SEQ ID NO: 33875 - protein, 70 aa, Homo sapiens
LRPGQDRARRPRRVLGASACLAAALAACHSVLARSPHRAEAAGWGGSGASTRFPAAGKPLDAPRGRATSG

SEQ ID NO: 33876 - protein, 14 aa, Homo sapiens
LSFGELTGICLCFL

SEQ ID NO: 33877 - protein, 19 aa, Homo sapiens
MFYKLLFLTFSHTLMIPAR

SEQ ID NO: 33878 - protein, 113 aa, Homo sapiens
MTYFLSFFLSCLLWPSDSCPRRPQPPPGPAAPGRAAPLGGRLRARGDGGPGRLEEAGGLRGGGAPRSWLAEHERPRSQALQVQMQREPGSRDDKIQPESVEVTPQWRDSSPCV

SEQ ID NO: 33879 - protein, 143 aa, Homo sapiens
VARPARPARSLQEEAAPDAPWGAGGARPVAPGARFVTLGALSGLSLICRRSPGGLLGCLLLPAGAGPPPSLVIRGWTSWEKELSVVFGGRDSPLLLGKKPDLPASWHLSLLLAPLCLASACILSVLRPLGVPCWPGSCVLRTR

SEQ ID NO: 33880 - protein, 36 aa, Homo sapiens
VGPESWFPGSLLRVWVSGHSGPVCVPVCVYVCVYVS

SEQ ID NO: 33881 - protein, 60 aa, Homo sapiens
LSGRQLMDLGSTPLRTQGTARGREGEGCRREELMLHTWMVIRLLWKYKKQFLFLILWILT

SEQ ID NO: 33882 - protein, 86 aa, Homo sapiens
MQQRSRKDQDASGGNAHDLHRSSVCALVFSRDAESRHTGSRSTDTTSASLTSQETSCVTGPAVTAGPVKYLPGGSSCYLTHNLLIP

SEQ ID NO: 33883 - protein, 11 aa, Homo sapiens
VVLFWNFFQVI

SEQ ID NO: 33884 - protein, 32 aa, Homo sapiens
VAEVSGQSARARMIPKSLLRHRREQDWHGWQE

SEQ ID NO: 33885 - protein, 33 aa, Homo sapiens
VAEPRRGHLKAALASLGGAAPAAATNGSPPLFK

SEQ ID NO: 33886 - protein, 102 aa, Homo sapiens
VPLSQTCPTHMWERSLSLVLGVPGFRRLLRTAVGVRCGVVLSVTAGSPVYTGSGSYGALSCHLIGPGVQWCPLGGAQGPMRQCCPVRTYHRLVSLRALHLPT

SEQ ID NO: 33887 - protein, 24 aa, Homo sapiens
KSQRPRTHQFRTQMHHCTPAWVTE

SEQ ID NO: 33888 - protein, 43 aa, Homo sapiens
VGAAVGRVAGSGGDSLGFRGLLFLVLLLSSLFPVWPWLTLKTL

SEQ ID NO: 33889 - protein, 86 aa, Homo sapiens
IGAGDAEQVAAAGQLGRQLGASGTVSRCFGHQPLPARPAPFSGLRALPAGLCAASGAAAALGAPLGAGGDREARVKGATGTLARYG

SEQ ID NO: 33890 - protein, 6 aa, Homo sapiens
VWAPGA

SEQ ID NO: 33891 - protein, 31 aa, Homo sapiens
MLSAHAPQFGPVNTCTTQVPWGGIWPVMVIR

SEQ ID NO: 33892 - protein, 28 aa, Homo sapiens
MDEAKRAESISAPRNGQGWLLEQRFRRW

SEQ ID NO: 33893 - protein, 28 aa, Homo sapiens
MLSWRCTGPGNEQVVAQMSQTLTILIEI

SEQ ID NO: 33894 - protein, 22 aa, Homo sapiens
MNEIEGGGVRMYVYESLIISGQ

SEQ ID NO: 33895 - protein, 90 aa, Homo sapiens
MTCWCRRERRGRRGWPGARGGDSVSHSCCFGAGPGRCRDVWRQESDDCRRRSAGALHLGPLPNRPRAHAPPGPRSEPAGGRGRALLARTD

SEQ ID NO: 33896 - protein, 46 aa, Homo sapiens
MHSGKELQCCVAQSPDLTFPLVQTRWYMPVIPTLRQEDHSSPEDQD

SEQ ID NO: 33897 - protein, 52 aa, Homo sapiens
MGNGSCVTTSTLARQRLDEEPPPDQFGPGICHVGILLLQKVCLVSPKLTSLQ

SEQ ID NO: 33898 - protein, 70 aa, Homo sapiens
MFPARRRAAVTRLSERLSLCFCLHSRLQDPAARPRPEQMEMGCHVVSCPMGKRLTCEELREASRKQPVKN

SEQ ID NO: 33899 - protein, 40 aa, Homo sapiens
MTPEILGLLGFIPSEPGLAFLGCKLRAGSRSAEPRFSHLP

SEQ ID NO: 33900 - protein, 92 aa, Homo sapiens
MLPHPQFSGSVRPEPQSPVSRGCVCGCHYSADTLAPPQRVAGPGNLHLNRPWLSHFGNCPKHLSNMGQVLRPKIRNLLNECMKVEPFPLMRR

SEQ ID NO: 33901 - protein, 27 aa, Homo sapiens
MVCVFLFCFSPPAGAVCGVGWGVRYVG

SEQ ID NO: 33902 - protein, 8 aa, Homo sapiens
MSHPRGPG

SEQ ID NO: 33903 - protein, 211 aa, Homo sapiens [sequence omitted]

SEQ ID NO: 33904 - protein, 27 aa, Homo sapiens
MTSILLQLPLPLSGSCLAVWCHELGVQ

SEQ ID NO: 33905 - protein, 52 aa, Homo sapiens
MDGKNKPAIPRGPTDPLKEVGCSCRTRETPKTVSVQLPKWERETLLSGTDTP

SEQ ID NO: 33906 - protein, 29 aa, Homo sapiens
MVPPPPPPPPFAPHDKLPVLPKGGRRLQA

SEQ ID NO: 33907 - protein, 6 aa, Homo sapiens
IRAHSV

SEQ ID NO: 33908 - protein, 39 aa, Homo sapiens
RSVGREESVEPPFHSLRERIGRAHEPSNPWLKHPLPKPG

SEQ ID NO: 33909 - protein, 20 aa, Homo sapiens
RSLSSFTASSASLCLCCVCG

SEQ ID NO: 33910 - protein, 13 aa, Homo sapiens
LANTGLKTGMGRA

SEQ ID NO: 33911 - protein, 112 aa, Homo sapiens
LSGAALNVTGKWFGRPRLTTPGRTDGRRRREPVAEPGDLENERVRLSVGHSVGPLNEVPAPLSPEPGAFPARWTVSPAVSMIVFLLQVLLMFKIACQLLSHEFSNKKMKSLC

SEQ ID NO: 33912 - protein, 34 aa, Homo sapiens
LKMVIMKRWLPWRPKSVIKLSIILATSICHGTSF

SEQ ID NO: 33913 - protein, 33 aa, Homo sapiens
TTSFGCSNSPQPLKDPCSLWIAWYLQHVSMPGR

SEQ ID NO: 33914 - protein, 8 aa, Homo sapiens
VSRSLSSK

SEQ ID NO: 33915 - protein, 43 aa, Homo sapiens
RLTEAASGRTFWLLTVLLWFSRIVCRCEINHEFRCSFDPREFC

SEQ ID NO: 33916 - protein, 55 aa, Homo sapiens
ILHLCRPGEQSKKQVPHTNKTKDANLSGRPNKKLIHGGMQLSHPNDFISLTPTNR

SEQ ID NO: 33917 - protein, 15 aa, Homo sapiens
KPFRVMPACLLMQLF

SEQ ID NO: 33918 - protein, 31 aa, Homo sapiens
LESVSSHRRSSARSVPGGRCADGCDCRILAG

SEQ ID NO: 33919 - protein, 22 aa, Homo sapiens
MGIETSEQADGKQHVIDAFVFK

SEQ ID NO: 33920 - protein, 35 aa, Homo sapiens
RFQRSRQAAYAAYFKLCYLRHRNQERCNGPASAHV

SEQ ID NO: 33921 - protein, 12 aa, Homo sapiens
MGLPRGMEAPRG

SEQ ID NO: 33922 - protein, 32 aa, Homo sapiens
VAGAWAAGCLTSLPLAHSDLCSDPAASLFLGV

SEQ ID NO: 33923 - protein, 31 aa, Homo sapiens
VAGAWAAGCLTSLPLAHSDLCSDPASLFLGV

SEQ ID NO: 33924 - protein, 65 aa, Homo sapiens
VVGVCVCVCVCVCVCVWLWVSCAVLLEHRGKAVDAGSQLAETCRPWSLMIVPVPLWRSLTAWRCW

SEQ ID NO: 33925 - protein, 87 aa, Homo sapiens
MSLLLLPPPSLPPSGVSSRLSLPVSSLWRKSVPPLPLYSGGGCGGGAGGCGGGGGSGARAVPVRVSRRAPWVVHLQIAERRPRDRWR

SEQ ID NO: 33926 - protein, 29 aa, Homo sapiens
LTGMLKGQRDGGILPERTSMGPSRSNSFL

SEQ ID NO: 33927 - protein, 13 aa, Homo sapiens
RCFSHCPRSLPPP

SEQ ID NO: 33928 - protein, 31 aa, Homo sapiens
TRPLSSPLASLAVSAFRSLAEAEARERSKED

SEQ ID NO: 33929 - protein, 23 aa, Homo sapiens
TGLVGVQRLGSVAFSPAVGARGK

SEQ ID NO: 33930 - protein, 20 aa, Homo sapiens
LAMDDRWVLGACSPQRLTVT

SEQ ID NO: 33931 - protein, 14 aa, Homo sapiens
LGVLDPRPAAPGWR

SEQ ID NO: 33932 - protein, 27 aa, Homo sapiens
LVIREERYLGFWFFSLIIMNIGFSPLK

SEQ ID NO: 33933 - protein, 14 aa, Homo sapiens
KYKLCFLFGSIGVL

SEQ ID NO: 33934 - protein, 23 aa, Homo sapiens
MSFDHPEKNGPWPADPINLPSHG

SEQ ID NO: 33935 - protein, 10 aa, Homo sapiens
IIFMNVFSLL

SEQ ID NO: 33936 - protein, 27 aa, Homo sapiens
LVLSLKKILQSLLILFLGVTIFEAKLT

SEQ ID NO: 33937 - protein, 27 aa, Homo sapiens
IFGRAAHSLLSSVFCAWTLWAHPGHGG

SEQ ID NO: 33938 - protein, 46 aa, Homo sapiens
LLLTLLLQLPTPAARRGPVPTGGLAEGAVVPRGPGTAVVCALGAWR

SEQ ID NO: 33939 - protein, 63 aa, Homo sapiens
MPGALPLCITSFKSFIPGLYITSWQWSSCRAIPRHRKLWALLSTSIISSSSTGKTSWTLLMPS

SEQ ID NO: 33940 - protein, 30 aa, Homo sapiens
KMAAVSVWGISAVRPGAPGSRLSFLPDSFY

SEQ ID NO: 33941 - protein, 13 aa, Homo sapiens
VAGVVAAMVKFAL

SEQ ID NO: 33942 - protein, 23 aa, Homo sapiens
MWILRDRAVHELQAVLLALVLGR

SEQ ID NO: 33943 - protein, 26 aa, Homo sapiens
LMFPGIMLRTAFRVAALFSSLHLGNT

SEQ ID NO: 33944 - protein, 15 aa, Homo sapiens
IMDFIYQIALFWISW

SEQ ID NO: 33945 - protein, 15 aa, Homo sapiens
LFLCIQPPSVPVMSL

SEQ ID NO: 33946 - protein, 27 aa, Homo sapiens
MKEQCGRSVLWMTTSAWPLQASPPMQG

SEQ ID NO: 33947 - protein, 25 aa, Homo sapiens
LLLLLGLRWTFLFLLFFFVFPLSSF

SEQ ID NO: 33948 - protein, 24 aa, Homo sapiens
MLIRGCAPCSSFMQALGKAGAAAA

SEQ ID NO: 33949 - protein, 57 aa, Homo sapiens
MGDEARGFPSRREAEADWLSGEARGRSLGTGRELGAGSSPPGRAGSGCCRLRQLLGG

SEQ ID NO: 33950 - protein, 14 aa, Homo sapiens
LASFPLSVLVLLTS

SEQ ID NO: 33951 - protein, 14 aa, Homo sapiens
LNLHKFACFCLLLS

SEQ ID NO: 33952 - protein, 38 aa, Homo sapiens
MRFRVSSGLSGSSPNIRISAGLAVTLSPSGLTGSEGHA

SEQ ID NO: 33953 - protein, 13 aa, Homo sapiens
IFVLTHIHVFLLH

SEQ ID NO: 33954 - protein, 57 aa, Homo sapiens
ITMIHVFYSKVLNMGVSFFYSLSLMTQQKRNCRPWDNQHLNKLYNYFFKLSYRVIRL

SEQ ID NO: 33955 - protein, 23 aa, Homo sapiens
RSFLTSVKRLFVFLLSLLHFNSF

SEQ ID NO: 33956 - protein, 40 aa, Homo sapiens
LTRDGDKRSFISLFVLGSFFFLNEKYSMWHFLKNKGNSFV

SEQ ID NO: 33957 - protein, 39 aa, Homo sapiens
LRSVALVLFKICLVSFHFGFFSRHVFLSELRFVLVLCTL

SEQ ID NO: 33958 - protein, 9 aa, Homo sapiens
ICNCFLFFV

SEQ ID NO: 33959 - protein, 45 aa, Homo sapiens
RSLMSRMKMKCLMPLCCHPRSTEQAGCWTFYIPRGKGAMWSSWRA

SEQ ID NO: 33960 - protein, 78 aa, Homo sapiens
KNGFLLQWREIITDGGTRRPSFPHRLLSLEASSEDLVGLSFWVWAISVLMCVLFYHYCIMVFKPVGTQRTSLCNNNEE

SEQ ID NO: 33961 - protein, 38 aa, Homo sapiens
LMALQGLNIKAFVLKGLVYSLRNIVMSFNVLRVDQGLL

SEQ ID NO: 33962 - protein, 19 aa, Homo sapiens
LAFYLVLFLVLHWWSVFCE

SEQ ID NO: 33963 - protein, 26 aa, Homo sapiens
MGARLLQLTADFSPKEVTVSQPNLSG

SEQ ID NO: 33964 - protein, 180 aa, Homo sapiens [sequence omitted]

SEQ ID NO: 33965 - protein, 66 aa, Homo sapiens
LLLSPGSCFLICISSGAGQVTTGGGMPEAARTGREGAPWIYSVNLLEGCWQFFLFVHHPALFNNCT

SEQ ID NO: 33966 - protein, 44 aa, Homo sapiens
LLGKRPSLWSFVTAALADECRPHFPPPWCHCLWTACQPHRTSYP

SEQ ID NO: 33967 - protein, 35 aa, Homo sapiens
MQAALPTAMVPLSVDSMPASSHELSLKMLKLAGCS

SEQ ID NO: 33968 - protein, 8 aa, Homo sapiens
MYFILVWC

SEQ ID NO: 33969 - protein, 31 aa, Homo sapiens
MSFLICVYSYLTVLFFLLIYINSFLPFFLNF

SEQ ID NO: 33970 - protein, 88 aa, Homo sapiens
MGLLLPFFLSPLHVKYCEEIALALFRLCCLKCTVQQSSSSHCCCLPHHTVSFQIPRSSQQDDSLWLHFSMPGRIFFNLPFRFQSSPST

SEQ ID NO: 33971 - protein, 18 aa, Homo sapiens
MNNKTTTTTTKKAFWDFG

SEQ ID NO: 33972 - protein, 40 aa, Homo sapiens
LDPTKDRRRFFCSNVGVRRKSAVCSTIIQCLLYNTFAVLF

SEQ ID NO: 33973 - protein, 148 aa, Homo sapiens
MGDLSRTALWLGGRRDPSGSFRVRDGAAAEVGRACLGLPSECGSLVRARASPRPLLGPAVCPWRARSPRPGLPRPSPTCPWKRGGDWCALSLVAPAASRHPPLSASEQRIPPTSTCTCTRPLGNPLAFLTTVQNQKQIEHWENKDDAS

SEQ ID NO: 33974 - protein, 33 aa, Homo sapiens
MQKIRGFTVLTRLILNFWAQSVHLPRPPKVLRL

SEQ ID NO: 33975 - protein, 29 aa, Homo sapiens
LLTLGALVFGGCALHLPLPPFSMRSPSSE

SEQ ID NO: 33976 - protein, 59 aa, Homo sapiens
VFPLKIRTTVLAGESHKRTRDLFKSLLLSLLTGIHRTLLIRKGYETHVLLQSPVVSVGA

SEQ ID NO: 33977 - protein, 138 aa, Homo sapiens
LVEPQLGRLEGLQALPHGPVEDFPVLFLVLRGRELVSAVQMLVLRDQARRSQLCPPPDILALLPQELSTDPPWSQEGTRKPPHGVPAGSSSPQPAVPTSCRGLYRPGATTALSVTLSSRGWALPQGSCMTMATYRRRP

SEQ ID NO: 33978 - protein, 178 aa, Homo sapiens
LGCVSWSQAAFLLSVRGQPSPHSHGQATQNEHDSRGPRPGAEPGAGSGRREGRVGVRGSSHRTAGTEARQALIRSVGTRDTEERCWAPGRCLLVPGWPQTSTASRKEPSASGAHQKPALSTRRASARPGHHPTSQGAGPVTDGSPRPHGQHRLTTALPRPGWSGRSGGAHGSHLGPWR

SEQ ID NO: 33979 - protein, 78 aa, Homo sapiens
LKRPRTSGHQTGWLPRSRSLRPGRPWHPYTLGLLPSSASLAPARLHPGLRLLVTGCVSPFCPWAAQSPQSRPSHAERT

SEQ ID NO: 33980 - protein, 33 aa, Homo sapiens
VRLRMLGRCSVSAAWLLLNGMTAFTAPCACLSI

SEQ ID NO: 33981 - protein, 24 aa, Homo sapiens
MKPVCFSAATSPRSCSGWCPPGPR

SEQ ID NO: 33982 - protein, 26 aa, Homo sapiens
MKPVCFSAATSPRSCSGWCPPGPSAL

SEQ ID NO: 33983 - protein, 68 aa, Homo sapiens [sequence omitted]

SEQ ID NO: 33984 - protein, 45 aa, Homo sapiens
LMAASGGTKKAQSGGRRLREPSSRPSRRARQRPRRGALRKAGRFL

SEQ ID NO: 33985 - protein, 111 aa, Homo sapiens
LWGAFCSCFLILFGVGTEGTSRPPVRLRECRRPGREAQMMGKQSHLEGVSWGQCQGDLTGQFILKQHYSVRFFWVRNSSWEVWSSGRRGGQKHPLVFLSHLEALSSSPRYW

SEQ ID NO: 33986 - protein, 60 aa, Homo sapiens
MERLSHMRPWPCLQAPAACQTLSPLGLYLAASQQAFAAGFTGFGGFCVLTIDSQAPESAA

SEQ ID NO: 33987 - protein, 43 aa, Homo sapiens
MEPLSAEPSAAAAAAAVPPLFFPGRSLLCGRAAGMDLSLRIPC

SEQ ID NO: 33988 - protein, 41 aa, Homo sapiens
LLRPSVLLLLQLPFLPSALLPNSLALLGNIDKLEPRSSWEF

SEQ ID NO: 33989 - protein, 145 aa, Homo sapiens
VTCPPSFRSPFPLHYPGLEPEPGGAPREWKSLGHAKVDPTQPPAVPSTPQTPPSSEATPRSCGRGPIWTPGSAGSAGRTLLSAAGRGGVRYLPGLPNPLEGASASKWFESGPLLFSRSKKIEQLTSFVCKTSFLASDLCYKVTRA

SEQ ID NO: 33990 - protein, 82 aa, Homo sapiens
LGTGERRLKSPDAGFLGWAFCLTHSFSLFLDFTDRSRNSFPHNGASCPRAGSTHRLMWQTLLPGKTKELSYSWRRTLRMLST

SEQ ID NO: 33991 - protein, 47 aa, Homo sapiens
MLGFFVCLFVCLLFFFSTALVVPSLSLEQGWLFFFNKIAGAQDCFPP

SEQ ID NO: 33992 - protein, 19 aa, Homo sapiens
LFVTKTVILLLLPPNCIRP

SEQ ID NO: 33993 - protein, 45 aa, Homo sapiens
MGILPGTKDAKLKTTIKAFFPKKHRRRFNHQMRGLTHLCILALIL

SEQ ID NO: 33994 - protein, 56 aa, Homo sapiens
LDSKILSLSLLTGIPISLVARCTYTSSTAVRTDRRQSFHVALSKSHLTSRPQCPHL

SEQ ID NO: 33995 - protein, 10 aa, Homo sapiens
LDLFLFLLGF

SEQ ID NO: 33996 - protein, 43 aa, Homo sapiens
MYSTFKKHFKANTYLYVHVKQIPPQLFSVLLFVVFSCVYLVEL

SEQ ID NO: 33997 - protein, 80 aa, Homo sapiens
MEAQGRARRPSPGKSSRKAECATALRGGPRLPECGRCCRCKQCLEERKAGNRVFAASVTTAHKKTSFWERGMIVGTLRIT

SEQ ID NO: 33998 - protein, 40 aa, Homo sapiens
MKIRRSCIHKTCVQKIKLFNPLVPGTIAEEVGVWTCKDLL

SEQ ID NO: 33999 - protein, 33 aa, Homo sapiens
MCFHCWLSVFKFSFSLMFLSCFASLITFSFLVF

SEQ ID NO: 34000 - protein, 54 aa, Homo sapiens
MFFCRNYGSFWFYVLSKMLSFFICLLIFVHLLLLSFLISDWPPPTGSAEHKYSG

SEQ ID NO: 34001 - protein, 18 aa, Homo sapiens
MEKAPHRDEETVHSTTSS

SEQ ID NO: 34002 - protein, 21 aa, Homo sapiens
MVEGEEEEQAYHMAKKGARER

SEQ ID NO: 34003 - protein, 57 aa, Homo sapiens
LFSMSVKCRGRITHSGGSPLACNEQSYGEAHVTVAMRVTLEVKPAAPVKPLEDCSPG

SEQ ID NO: 34004 - protein, 54 aa, Homo sapiens [sequence omitted]

SEQ ID NO: 34005 - protein, 16 aa, Homo sapiens
MEPETYDARCLDKASR

SEQ ID NO: 34006 - protein, 52 aa, Homo sapiens
VTGFWMADHSTFFFLSFLLCCHLPLISASFCDSLTEKEVEWNKIPQYSTIIH

SEQ ID NO: 34007 - protein, 40 aa, Homo sapiens
MWFTPASLVVCSFLVSSIIPRTSFSATCQKHQHQPGGTLP

SEQ ID NO: 34008 - protein, 49 aa, Homo sapiens
LVAAAAVVFSWCPAETAAAQGVAGPTQDLPGPSALRDKGPALAKADGQE

SEQ ID NO: 34009 - protein, 98 aa, Homo sapiens
LPVGLGKRGPLVAQSGGSWEILGWPSHTLRRRRFCWTPGENHGSCSHQLPLHSPTGSDPTPHSPPDRKQEGGSRGLCVPPTGDPSRQPGVTSPSSSST

SEQ ID NO: 34010 - protein, 20 aa, Homo sapiens
LYILLLHLLLIKLVAPFTFL

SEQ ID NO: 34011 - protein, 44 aa, Homo sapiens
LYETCEEEYMGLRTKKWKQEWTHLSFPMTSWGTLCFLSLQLWAL

SEQ ID NO: 34012 - protein, 21 aa, Homo sapiens
MSPLKSLWKELGHEKSPHEWD

SEQ ID NO: 34013 - protein, 58 aa, Homo sapiens
MLWDLTVLDTCMAVCCGLCLACGSLLLWPPPPLMYKPRLCSASLGPRQAAVHSLTREV

SEQ ID NO: 34014 - protein, 43 aa, Homo sapiens
LLSHVLYMLLMKLLKGLNVTDVFGRMRLSVPVQLCPNAVLISQ

SEQ ID NO: 34015 - protein, 36 aa, Homo sapiens
MPRPPETMCQARIALDRCNLRTAFILFSLILSHYVF

SEQ ID NO: 34016 - protein, 10 aa, Homo sapiens
MKLKRKGVDK

SEQ ID NO: 34017 - protein, 56 aa, Homo sapiens
LGGGYHSRARNCKENRMLTVSLYSFLARKKRLWYSNFIFMILTLKLGMLPAWLLLT

SEQ ID NO: 34018 - protein, 26 aa, Homo sapiens
LFCYSVKLFSTVLTLQLTVQLHSSWT

SEQ ID NO: 34019 - protein, 47 aa, Homo sapiens
MPEYCPQAERRLQRGAGFQQARLTRSLAFPVLALGRPRCCFPLGASF

SEQ ID NO: 34020 - protein, 38 aa, Homo sapiens
VVVQILLALCYGFLRVFSWFCLASSGKCPKRLEHCIKS

SEQ ID NO: 34021 - protein, 58 aa, Homo sapiens
MDSKLGVKVHTWVSEAQYSYTSLLSMTATFLQGLKKMLQKIGTLLSLPNLLLPLMFLP

SEQ ID NO: 34022 - protein, 63 aa, Homo sapiens
MKLRATENTCTMVSGRSLFPQPKTDSFAGHLFSTARTLPLSVERGRGSAYGARRSDSAVNTLG

SEQ ID NO: 34023 - protein, 8 aa, Homo sapiens
LTMLCFFF

SEQ ID NO: 34024 - protein, 53 aa, Homo sapiens [sequence omitted]

SEQ ID NO: 34025 - protein, 33 aa, Homo sapiens
MVPTAAIAVGGYFLGGVSSVHGVTLRPLLAAPA

SEQ ID NO: 34026 - protein, 92 aa, Homo sapiens
LCPAEPRCLLGWLAAARGGGWPFIWGALSLPGQALEQSSSGSCLHLQDVQQAARRRMPATHPPPVPSLSPVGHSRFCLFPVYCPQCRGLCCP

SEQ ID NO: 34027 - protein, 9 aa, Homo sapiens
LSVSLLSLL

SEQ ID NO: 34028 - protein, 29 aa, Homo sapiens
LILHMFVWEKGCCVFFLLLFIFWIGKSLA

SEQ ID NO: 34029 - protein, 48 aa, Homo sapiens
LRSSEHVRRGWLWQMQLQSCLLVLSLKKILQSLLILFLGVTIFEAKLT

SEQ ID NO: 34030 - protein, 69 aa, Homo sapiens
LQPLPPLLASAVAAGDCGSLRVPLAGREVPLLFPLPFPKSCLLVLSLKKILQSLLILFLGVTIFEAKLT

SEQ ID NO: 34031 - protein, 46 aa, Homo sapiens
LLRGIVGVSASRSLGESCLLVLSLKKILQSLLILFLGVTIFEAKLT

SEQ ID NO: 34032 - protein, 52 aa, Homo sapiens
LFSSSCLPSLPPFSFLPNSLHSNQFLDASSSFPFLLLFPSCVVLLPTSCFHP

SEQ ID NO: 34033 - protein, 37 aa, Homo sapiens
MQRPWVCVFIALSCWLPAAPPVPGRALGQRLSAPPPS

SEQ ID NO: 34034 - protein, 6 aa, Homo sapiens
KMRRRL

SEQ ID NO: 34035 - protein, 25 aa, Homo sapiens
VITFYSTMYMYGIVLINELGKDVIN

SEQ ID NO: 34036 - protein, 35 aa, Homo sapiens
MAPTSPPVSTLGLLLFRRTTSGPPSSKTARAVVVP

SEQ ID NO: 34037 - protein, 13 aa, Homo sapiens
MKMTLLLMIPVLL

SEQ ID NO: 34038 - protein, 44 aa, Homo sapiens
RLKQPKVSWSLCDSGKKWREHSVSPTSFLTLLPYLSFFPTGLSR

SEQ ID NO: 34039 - protein, 51 aa, Homo sapiens
KAPIRRLPHCKTTWLSLCTAMSPLTTEIWALRRGNSSASWSRAASGGRRSP

SEQ ID NO: 34040 - protein, 15 aa, Homo sapiens
VVFPEQGLAILLWMC

SEQ ID NO: 34041 - protein, 48 aa, Homo sapiens [sequence omitted]

SEQ ID NO: 34042 - protein, 14 aa, Homo sapiens
LRFPMGLACGAWAL

SEQ ID NO: 34043 - protein, 20 aa, Homo sapiens
KGPKLTLVLQMWMFMAQIGT

SEQ ID NO: 34044 - protein, 23 aa, Homo sapiens
RRPRACTSLAVSSPSASGAFSVE

SEQ ID NO: 34045 - protein, 19 aa, Homo sapiens
ITLRFLLLMRTLSAYAKKF

SEQ ID NO: 34046 - protein, 18 aa, Homo sapiens
LFFLKKYTSCLLYFALGT

SEQ ID NO: 34047 - protein, 35 aa, Homo sapiens
MRNHHSSFRIDAVIFFFGFWFFQPSWLASHMPACH

SEQ ID NO: 34048 - protein, 20 aa, Homo sapiens
RSRWWDLTVGPISLFSALLA

SEQ ID NO: 34049 - protein, 12 aa, Homo sapiens
LNLLSLAVYIFT

SEQ ID NO: 34050 - protein, 44 aa, Homo sapiens
KLKHFQSLSGAQRFGRLIDHGARVLLVAAAAAAGARLCDHARTL

SEQ ID NO: 34051 - protein, 41 aa, Homo sapiens
LWVCECLCVLLFTSHLLKSVYVRGWGVCVKESEEEKEREIN

SEQ ID NO: 34052 - protein, 21 aa, Homo sapiens
ILRDRAVHELQAVLLALVLGR

SEQ ID NO: 34053 - protein, 40 aa, Homo sapiens
KILLIYFLIMLISNEDSCLKIFFNLMVSIFCKNHVNLFHS

SEQ ID NO: 34054 - protein, 41 aa, Homo sapiens
LSLLCPPPPPSAFALLSSFSPEVRAASSPLVLFLPSLCSLL

SEQ ID NO: 34055 - protein, 21 aa, Homo sapiens
IRKAFVLCGFLYFEFFDQKTD

SEQ ID NO: 34056 - protein, 38 aa, Homo sapiens
KQRKVHPSLVSRTRRLVQVCLFWTSSMPSNQVPLTMTF

SEQ ID NO: 34057 - protein, 21 aa, Homo sapiens
RPCYAVYLGVLYVLLPMPSLK

SEQ ID NO: 34058 - protein, 35 aa, Homo sapiens
LEGSSLSMLDFQWQLQWPFMWLAVSLVVTSTQLCL

SEQ ID NO: 34059 - protein, 31 aa, Homo sapiens
LLPISLKGLLLVGLLCTVLQVSSAKGASRGK

SEQ ID NO: 34060 - protein, 53 aa, Homo sapiens
KGLQKTFLSHIFLLLISQQLKFQLMDSILPVKTSSPENCASWHPAVPKYYLTH

SEQ ID NO: 34061 - protein, 93 aa, Homo sapiens
MRFLISIICTWRFIQERITGADLNHGAHKWGGCSSGHGKNFLLQLETAFCVAGYHADSTNTNPHLDAVQTPDVPPISVSLGNVSMTERLKDRV

SEQ ID NO: 34062 - protein, 30 aa, Homo sapiens
MDRQWCSGTEQILEGVGRPINQETSEIKVA

SEQ ID NO: 34063 - protein, 33 aa, Homo sapiens [sequence omitted]

SEQ ID NO: 34064 - protein, 60 aa, Homo sapiens
MCLYVFPSTIIIVIINFFRSKLNISQLKFLSSIQHLLYQNLIFKNKTFLEFIIDVCLMAS

SEQ ID NO: 34065 - protein, 80 aa, Homo sapiens
MFNHLLVSKVIWVSIFLHPPLKTDLFHTFEMYEKPEIQDPPWPAPFFSPTVLRISQLSFTSLIEITVLMESVCGNERWLP

SEQ ID NO: 34066 - protein, 74 aa, Homo sapiens [sequence omitted]

SEQ ID NO: 34067 - protein, 74 aa, Homo sapiens
MWRSSARASVVMTVFALRGEGMCDHFQRLTCIPQIVWMSYNLNLQTQYSQTLGSDSLQASCTSPRKRACFPLDM

SEQ ID NO: 34068 - protein, 40 aa, Homo sapiens
MASFLEACETTNPSIKKRPLIRRRLLVSFLGTHSGFLQSR

SEQ ID NO: 34069 - protein, 162 aa, Homo sapiens
MPLHLAATSALRRLPATGPRHHCPTAPMLSMPPAPFAGPGLPASMAASASFSRARWIRLPGAPCCCAHLPTQVPTSCSPEGALHVGHSLLAQPHQMDMLDGLCPSPQLWPPKEVPKISTPVMLMGPSAPALSWVDGGKPSPMALPFLGHPTSCRRHCVPLGE

SEQ ID NO: 34070 - protein, 43 aa, Homo sapiens
MSCRSCLRCRLKSVKLMSSSLWTTTAVSTWTASLLRSRPSTRI

SEQ ID NO: 34071 - protein, 70 aa, Homo sapiens
MDASLPRTTERVSLCCQAEVLWCDLSSLQPPLSGFKQFSCLSLPSSWDYRHMPPRPANFCNLSRDGVSPC

SEQ ID NO: 34072 - protein, 44 aa, Homo sapiens
MHLIPHSPNFYNLSRCSLLRTTKQEKITFGLRNSQSFSLSRKAQ

SEQ ID NO: 34073 - protein, 61 aa, Homo sapiens
MSLLLHPAPLGAASVIHALPGPSTHCCECASPEPVKRQLSILETQIIRALPCTEEKGSTRP

SEQ ID NO: 34074 - protein, 246 aa, Homo sapiens [sequence omitted]

SEQ ID NO: 34075 - protein, 41 aa, Homo sapiens
ILARSDPRIFLLSRETRRIMRLFLVAFQEYEEKNGSQSGFE

SEQ ID NO: 34076 - protein, 37 aa, Homo sapiens
LHLEHRANIVTFPVMASFLSPLPTVLLRAGSTPWSTP

SEQ ID NO: 34077 - protein, 55 aa, Homo sapiens
LGADIHTHIHTDTQSHTHSHTLSLSLPLSFSLSLSLCPFLLDRSTVIHRNKHTRT

SEQ ID NO: 34078 - protein, 4 aa, Homo sapiens
ILAS

SEQ ID NO: 34079 - protein, 12 aa, Homo sapiens
KRPNTINILPCW

SEQ ID NO: 34080 - protein, 22 aa, Homo sapiens
LAYILLFLDFFLIKRLLQCLSC

SEQ ID NO: 34081 - protein, 51 aa, Homo sapiens
RPFSAVFAPSMLASQVPPLSSLRIRRKQTPLLSRICSSVSSTSSTRYVTLA

SEQ ID NO: 34082 - protein, 33 aa, Homo sapiens
IVPHSTATSSTLVSKISLLPIAMILCLKPCALG

SEQ ID NO: 34083 - protein, 19 aa, Homo sapiens
IYLRQILSFFLSPIFSGSL

SEQ ID NO: 34084 - protein, 61 aa, Homo sapiens
LNFPVPLLGCLLFRCPFAPQTTSWSALSSVAGSGDGAPGRRPKSRVRGPLHHPPGPTPGPR

SEQ ID NO: 34085 - protein, 47 aa, Homo sapiens
LLLLTTTTTTGAASAVPGVSSCSGHTAPGDCSSSNQNLGLTGTLAPK

SEQ ID NO: 34086 - protein, 75 aa, Homo sapiens
MSILHPSPGRREIKNPFIGLSPPSPLSIATFSSFEFELWSYCSTVWRGRGLGVFSFVCFPFFFLFFFFFFLLALR

SEQ ID NO: 34087 - protein, 13 aa, Homo sapiens
RGFTMLAMVVSIS

SEQ ID NO: 34088 - protein, 74 aa, Homo sapiens
LLPRVLSHLAAAAPVQTLTLPPKAQPSPNNPQPCTDVGCESLCLSKNQALLETFKQRLDNYFSRTERKLMHQKR

SEQ ID NO: 34089 - protein, 13 aa, Homo sapiens
RYFLLLFFLFEFL

SEQ ID NO: 34090 - protein, 87 aa, Homo sapiens
LDFQLALAISPAPLRGTAPAPVSAVPLTLAPPSGSPWTVTQPAPPLLVATGWEWLRGYLLLAACQREEGGGKKKGGGVEGGGPGPGE

SEQ ID NO: 34091 - protein, 27 aa, Homo sapiens
LSGYPDKSGLVFLMLPLLVLSSLSAKC

SEQ ID NO: 34092 - protein, 57 aa, Homo sapiens
VLPVQLFFVWIIMQQLLKPSSFIRLMQNSVILIPPRKEQAQLTLRTRKVPPTTPALR

SEQ ID NO: 34093 - protein, 35 aa, Homo sapiens
IEDHDSQEVMRRPGTTSPGMHRRRVREFSPSQLDY

SEQ ID NO: 34094 - protein, 25 aa, Homo sapiens
MYKPGFFFYTTLTHLLHSFSCEICE

SEQ ID NO: 34095 - protein, 45 aa, Homo sapiens
MHQVSGPAMTLSLCWASPCCWEPPGPWPSFLLASSCCPSCSSSPS

SEQ ID NO: 34096 - protein, 13 aa, Homo sapiens
ILRLLEITLLMTS

SEQ ID NO: 34097 - protein, 43 aa, Homo sapiens
TARSFFSALVRFLFGFLPASGATRVARQQPLGDLVLGSCPAWG

SEQ ID NO: 34098 - protein, 47 aa, Homo sapiens
LWRLVSASCRMKLSVSVEPGISGRGRYKIFKWRSIPEPNHGCDFIYR

SEQ ID NO: 34099 - protein, 20 aa, Homo sapiens
LAILSLSSSIPQLSLSRTGL

SEQ ID NO: 34100 - protein, 10 aa, Homo sapiens
TVVRGRDHTL

SEQ ID NO: 34101 - protein, 44 aa, Homo sapiens
RQNPGLLTSQWGMLFTLQLTLGLPGALSLGCLMRDVQGFSWVGV

SEQ ID NO: 34102 - protein, 67 aa, Homo sapiens
INRKIIKRKMNPQNDSLQIPQGIRRQVQSQRQAMMAMVILVNKKRGDVGGKPPRCRGKRPRARAVPV

SEQ ID NO: 34103 - protein, 77 aa, Homo sapiens
LRATGPAPFRRSDATQWMCTWVGETCSAGGIKPQIREFEGFIGAESEGTAKPPPTLIPDPSVTQLWTVLPPLLLSAA

SEQ ID NO: 34104 - protein, 50 aa, Homo sapiens
LLEETRSRDSFFPALRGTRSLLRSFCLSIACAVSWTAHGSSAGDAGISGS

SEQ ID NO: 34105 - protein, 13 aa, Homo sapiens
INMFLAGLSGSCL

SEQ ID NO: 34106 - protein, 39 aa, Homo sapiens
VCMQRPWVCVFIALSCWLPAAPPVPGRALGQRLSAPPPS

SEQ ID NO: 34107 - protein, 18 aa, Homo sapiens
IYLMLLVFFGDLQGKEAG

SEQ ID NO: 34108 - protein, 61 aa, Homo sapiens
VAFGSSTFALVPVFAHLSILQSLVPAAGAASPVAISAQHLCYSHVTPGDPGAGAGQGPAPS

SEQ ID NO: 34109 - protein, 52 aa, Homo sapiens
RRPNAEAAQWCWDSITNNKSNTLITDTPAAQTTLPLCVGNPTQAHFPHWNYL

SEQ ID NO: 34110 - protein, 165 aa, Homo sapiens
TCKFAGAASQAPHAPAFLRARGEPQDPLSHPRVPAVSANCRMWKHLPVHSSPTPRLTPLWKLQARWLLPQLVYLQGWGSYSLLRPAALISMVLLAREFLYPAKMSVSEVCSSGLSSPLLEQHKTNLIFYASGDICSANGKSGFNQPLPFLKTFCCTHRILSCTYL

SEQ ID NO: 34111 - protein, 23 aa, Homo sapiens
KASLLMVLTFGIGSMYPGQSTSN

SEQ ID NO: 34112 - protein, 48 aa, Homo sapiens
KREYDLCIGRVLSLFVVVTTYPIQLYVSFSFLIWWHWYNHTLKSVVHF

SEQ ID NO: 34113 - protein, 16 aa, Homo sapiens
KSCFCRILGQTIYLDE

SEQ ID NO: 34114 - protein, 93 aa, Homo sapiens
RQSLWYPGALASMWPLQHISVASVSVVSFLCLAPHGFKSTRAGVETAHLALILSDWWFWPVSRYLSIGKAALRCGGHPDSHRLHSRNGSMRLY

SEQ ID NO: 34115 - protein, 14 aa, Homo sapiens
LPAALLLLLLLWDR

SEQ ID NO: 34116 - protein, 37 aa, Homo sapiens
ILEATCGLLSPLLPFFPRKPTTKKCLVMERTPVENGK

SEQ ID NO: 34117 - protein, 33 aa, Homo sapiens
MASCSLLSFIASCLYSVFWETAWSSWSLWSARS

SEQ ID NO: 34118 - protein, 64 aa, Homo sapiens
IRRFSGGWLLSAAGCSSTRPPSQPQPAAPTLPAPSRPVSYCRRHRRGSGPGPDGSVQRRLQDDE

SEQ ID NO: 34119 - protein, 72 aa, Homo sapiens
RKMKAVVARTGAAAVSGEGRRMQRPPAWSAGPGAATRAGRGGSTPWAPHSPPQVLRMASRETRKWTPWLLES

SEQ ID NO: 34120 - protein, 42 aa, Homo sapiens
LMYWKCFLTFGSLCSHCPHPRPTTKNPAEAETTKRQSSLLLQ

SEQ ID NO: 34121 - protein, 11 aa, Homo sapiens
VGNVRPDCHMY

SEQ ID NO: 34122 - protein, 35 aa, Homo sapiens
LPKTCARGLLIALSPSLVSRPLPRLAISLLYFLSL

SEQ ID NO: 34123 - protein, 90 aa, Homo sapiens
RSRPRIWAWRGPWCPWPGFPRPERCVWWGMVPLWTCCCWSCTWRMSAAVVGGPWRTCNAYPGPWALLPPSSSGKWQNECCSRSTGCRAQS

SEQ ID NO: 34124 - protein, 1795 aa, Homo sapiens
MFSPLKSRARALAHGDPFQVSRAQDFQVGVTVLEAQKLVGVNINPYVAVQVGGQRRVTATQRGTSCPFYNEYFLFEFHDTRLRLQDLLLEITAFHSQTLPFMATRIGTFRMDLGIILDQPDGQFYQRWVPLHDPRDTRAGTKGFIKVTLSVRARGDLPPPMLPPAPGHCSDIEKNLLLPRGVPAERPWARLRVRLYRAEGLPALRLGLLGSLVRALHDQRVLVEPYVRVSFLGQEGETSVSAEAAAPEWNEQLSFVELFPPLTRSLRLQLRDDAPLVDAALATHVPDLRRISHPGRAAGFNPTFGPAWVPLYGSPPGAGLRDSLQGLNEGVGQGIWFRGRLLLAVSMQVLEGRAEPEPPQAQQGSTLSRLTRKKKKKARRDQTPKAVPQHLDASPGAEGPEIPRAMEVEVEELLPLPENVLAPCEDFLLFGVLFEATMIDPTVASQPISFEISIGRAGRLEEQLGRGSRAGEGTEGAAVEAQPLLGARPEEEKEEEELGTHAQRPEPMDGSGPYFCLPLCHCKPCMHVWSCWEDHTWRLQSSNCVRKVAERLDQGLQEVERLQRKPGPGACAQLKQALEVLVAGSRQFCHGAERRTMTRPNALDRCRGKLLVHSLNLLAKQGLRLLRGLRRRNVQKKVALAKKLLAKLRFLAEEPQPPLPDVLVWMLSGQRRVAWARIPAQDVLFSVVEEERGRDCGKIQSLMLTAPGAAPGEVCAKLELFLRLGLGKQAKACTSELPPDLLPEPSAGLPSSLHRDDFSYFQLRAHLYQARGVLAADDSGLSDPFARVLISTQCQTTRVLEQTLSPLWDELLVFEQLIVDGRREHLQEEPPLVIINVFDHNKFGPPVFLGRALAAPRVKLMEDPYQRPELQFFPLRKGPWAAGELIAAFQLIELDYSGRLEPSVPSEVEPQDLAPLVEPHSGRLSLPPNVCPVLREFRVEVLFWGLRGLGRVHLLEVEQPQVVLEVAGQGVESEVLASYRESPNFTELVRHLTVDLPEQPYLQPPLSILVIERRAFGHTVLVGSHIVPHMLRFTFRGHEDPPEEEGEMEETGDMMPKGPQGQKSLDPFLAEAGISRQLLKPPLKKLPLGGLLNQGPGLEEDIPDPEELDWGSKYYASLQELQGQHNFDEDEMDDPGDSDGVNLISMVGEIQDQGEAEVKGTVSPKKAVATLKIYNRSLKEEFNHFEDWLNVFPLYRGQGGQDGGGEEEGSGHLVGKFKGSFLIYPESEAVLFSEPQISRGIPQNRPIKLLVRVYVVKATNLAPADPNGKADPYVVVSAGRERQDTKERYIPKQLNPIFGEILELSISLPAETELTVAVFDHDLVGSDDLIGETHIDLENRFYSHHRANCGLASQYEVDGYNAWRDAFWPSQILAGLCQRCGLPAPEYRAGAVKVGSKVFLTPPETLPPGSSSPTVASGDPEEAQALLVLRRWQEMPGFGIQLVPEHVETRPLYHPHSPGLLQGSLHMWIDIFPQDVPAPPPVDIKPRQPISYELRVVIWNTEDVVLDDENPLTGEMSSDIYVKSWVKGLEHDKQETDVHFNSLTGEGNFNWRFVFRFDYLPTEREVSVRRRSGPFALEEAEFRQPAVLVLQVWDYDRISANDFLGSLELQLPDMVRGARGPELCSVQLARNGAGPRCNLFRCCRRLRGWWPVVKLKEAEDVEREAQEAQAGKKKRKQRRRKGRPEDLEFTDMGGNVYILTGKVEAEFELLTVEEAEKRPVGKGRKQPEPLEKPSRPKTSFNWFVNPLKTFVFFIWRRYWRTLVLLLLVLLTVFLLLVFYTIPGQISQVIFRPLHK

SEQ ID NO: 34125 - protein, 32 aa, Homo sapiens
ICLLIFVHLLLLSFLISDWPPPTGSAEHKYSG

SEQ ID NO: 34126 - protein, 57 aa, Homo sapiens
RIPVMMLMSLSEILSVLFLLHCTEPLRVECEVLIYVCLVELSYQEHIDALKDNPRRV

SEQ ID NO: 34127 - protein, 46 aa, Homo sapiens
LPPGVTWIQMRRDSNVMLRSLGSHPVTLEETSPRKVLTYRRRTWPG

SEQ ID NO: 34128 - protein, 15 aa, Homo sapiens
TGPPTAAWVLFLAWP

SEQ ID NO: 34129 - protein, 18 aa, Homo sapiens
LSCLFVVLKGRSFVLWVC

SEQ ID NO: 34130 - protein, 11 aa, Homo sapiens
MKKKMLLYWIL

SEQ ID NO: 34131 - protein, 28 aa, Homo sapiens
VRDAVSCVIPVIALQALSPSTWSLCPGR

SEQ ID NO: 34132 - protein, 43 aa, Homo sapiens
MVLSQINHIIMIRNQGYKMRRKVMALELASFNCFGFLHQLTFG

SEQ ID NO: 34133 - protein, 52 aa, Homo sapiens
LANPLPGSKCLQLGVSGALATSGAASCGPITLFSKRTCQRLGVLTAARTKVG

SEQ ID NO: 34134 - protein, 6 aa, Homo sapiens
MIVFGT

SEQ ID NO: 34135 - protein, 107 aa, Homo sapiens
KDQTASRKLHTMTPCLESFCQRAKDCKQNIPLPFLIQDWPLSESKPQGQDFWTPQPLQAAAPSHEFQQVALHPARTRLASRPQGGRLMSSREVGLRAPRCSCGKRKR

SEQ ID NO: 34136 - protein, 20 aa, Homo sapiens
LGWWGGLVWVQVGLIELVLC

SEQ ID NO: 34137 - protein, 13 aa, Homo sapiens
LPAISLPLLLSGV

SEQ ID NO: 34138 - protein, 35 aa, Homo sapiens
IIGKCCTMPLSVWFLVVAGLGPSDSWRLCRLPASL

SEQ ID NO: 34139 - protein, 43 aa, Homo sapiens
RNTAKSTGRSEMWMLLLHLRGHLSPAPPKMSCSPPERALHVTK

SEQ ID NO: 34140 - protein, 41 aa, Homo sapiens
ICALGPGLLLSLPSIGAQHPLPAHPSDSNSSPAPRPCVHFS

SEQ ID NO: 34141 - protein, 33 aa, Homo sapiens
LLLVFSPVLFSPLLRKACQGVGERDANTKVENS

SEQ ID NO: 34142 - protein, 53 aa, Homo sapiens
LSRGRRKRRKHKSGKQLMTSHGVPAVSSGRCLPGLPSHTLGVLAEGTWLVGLS

SEQ ID NO: 34143 - protein, 23 aa, Homo sapiens
LPLLLLLRLLAEAGGSSGGGGGG

SEQ ID NO: 34144 - protein, 41 aa, Homo sapiens
IEFLWCSLACSSVFCISCSVMFKLRNALCGSSESHLWFSRH

SEQ ID NO: 34145 - protein, 11 aa, Homo sapiens
LTSILFIFQCL

SEQ ID NO: 34146 - protein, 33 aa, Homo sapiens
LFSFGAEPKNVHPLSLVLWCLLIFVFVLSIHLL

SEQ ID NO: 34147 - protein, 16 aa, Homo sapiens
LFILGALWTLVIINQE

SEQ ID NO: 34148 - protein, 78 aa, Homo sapiens
ITLSRLHLRLLLQPTFLSPEYISYPHLSLLFFPFFYMFKFKPFFVTPFLGRFMARTRRMMVLVRGCPVSLNFGVLCIK

SEQ ID NO: 34149 - protein, 115 aa, Homo sapiens
RTSASRWWIWRPWAGCWVRCCCWLSLASPSLSTSTMAPGSSAAVAKLRSPSPKALTTRRSSLTTRPTGRPSPAPRTTPSPRRHRCPQSPHPPALPPQAVPLSPPQRPELAEAPRR

SEQ ID NO: 34150 - protein, 37 aa, Homo sapiens
KNSPHQCRLPIRKWWLVWLMPWPTSITKLAFLLSNFY

SEQ ID NO: 34151 - protein, 31 aa, Homo sapiens
MNMLIGVELQRLLVFQVFLFIQLDTMMHRSS

SEQ ID NO: 34152 - protein, 24 aa, Homo sapiens
MKSIRKAFVLCGFLYFEFFDQKTD

SEQ ID NO: 34153 - protein, 9 aa, Homo sapiens
IFFGKVFLV

SEQ ID NO: 34154 - protein, 32 aa, Homo sapiens
ILAKRLRAVLAFAATWLGQLTQVSCLPSSACL

SEQ ID NO: 34155 - protein, 57 aa, Homo sapiens
KKNKLRTTLYVHLQMPQLMLVGCLSAFCDNEHMDFCLLNSVDPFSQLPGAWIFTSNC

SEQ ID NO: 34156 - protein, 55 aa, Homo sapiens
RHLALRPGYVSPRARVGLLPGPLAARVHGVPGIFRVFWHLPPLPGAHLPAPVRQP

SEQ ID NO: 34157 - protein, 21 aa, Homo sapiens
VAGSLCVLQIVTLMVAPVFHD

SEQ ID NO: 34158 - protein, 37 aa, Homo sapiens
LVAFWCLRLLWPLLSLWRQMMLEIDFGFSWSWNLCNV

SEQ ID NO: 34159 - protein, 59 aa, Homo sapiens
LWISLRDHPKRRKVTSHSCPLAALCRNASSAAKRPEPLGQSCPGKPGQPTPGSEGVSRE

SEQ ID NO: 34160 - protein, 20 aa, Homo sapiens
TQNAARSSRALQALRPRAGG

SEQ ID NO: 34161 - protein, 21 aa, Homo sapiens
LDPCLPSERTALFLELGSDTC

SEQ ID NO: 34162 - protein, 11 aa, Homo sapiens
LVVVYRLAIAV

SEQ ID NO: 34163 - protein, 14 aa, Homo sapiens
LLGFCLLLWRCSVC

SEQ ID NO: 34164 - protein, 16 aa, Homo sapiens
LGKEFLSFFSFFLSQF

SEQ ID NO: 34165 - protein, 73 aa, Homo sapiens
MISGPKKKMDKPGNESLQCDAITGNTRVEIGWAAFFSLEDFLSKSILSFHIFISFVRNCQNLEATMMPISFSK

SEQ ID NO: 34166 - protein, 53 aa, Homo sapiens
MLRYRGSGSLLCGPFLQSDFALLSSPHSPLHLPHQKREVGATTALSAQAPVSW

SEQ ID NO: 34167 - protein, 115 aa, Homo sapiens
VSRLAPARSGDRGARGRGEARTGLRWARELCREEGRRTMDWGWGMVGIPASANPSNGGAHRAVGSEGMFSPGPDRALSGFNLSWSSRHRFMKRYRCVHSSLELIRPPTPTSGKRF

SEQ ID NO: 34168 - protein, 28 aa, Homo sapiens
MTECDHASLWLAMVFIRWQVLPGWSESQ

SEQ ID NO: 34169 - protein, 47 aa, Homo sapiens
MYIFIYTCTYISSTTFGSLSSCFSGLKPVLHDKSGLVTGDNCVLLGL

SEQ ID NO: 34170 - protein, 48 aa, Homo sapiens
MFSTSFLAANFSPIVFLLQQGEKVLCGPRRAVKLRVRGSVRGRMCVRV

SEQ ID NO: 34171 - protein, 66 aa, Homo sapiens
LHLLLKATAALLTSTLSPPYSLRRKSRRARMLCKSSMSSWWKRGLRPSACSCCTAAWPRATSRAEN

SEQ ID NO: 34172 - protein, 54 aa, Homo sapiens
MWRQPQPPVFEEGDSDSDTGIMVTVEMDWKVRSPCPPRLQSSFFQGGNSPNLES

SEQ ID NO: 34173 - protein, 83 aa, Homo sapiens
VRSRGEGGVVLGCRNQGVFRKEDMPAVGFEGQVGGHQRPGQGRRGRHSQDGARPSKAQSHTVGQCCLCAIMPACLAVLLSDQK

SEQ ID NO: 34174 - protein, 18 aa, Homo sapiens
LVSMMLLIWLQKGQLRQP

SEQ ID NO: 34175 - protein, 54 aa, Homo sapiens
MLRGTHQWKKTSGWTWRGRQGSMPAEEHTTDAGRPPSGRTRRSLAGAVGGELGH

SEQ ID NO: 34176 - protein, 77 aa, Homo sapiens
LWAAFLTLDACGQPSSPWMPVGCLPHPGCLWAAFLTLDACGLPSSPWMPVGSLPHPGCLWAAFLTLDACDLVSMGAS

SEQ ID NO: 34177 - protein, 28 aa, Homo sapiens
MKRQAIDGENTQNNGSDRGLYLEYMKIF

SEQ ID NO: 34178 - protein, 43 aa, Homo sapiens
MVASLTHKGTRMANGQEGNPYGRWTEREVNVNISLGMPLSPLE

SEQ ID NO: 34179 - protein, 77 aa, Homo sapiens
LVIMWEWLPVHATGLQLHCLNGAMSHRGGRQGAGHLITRAVTSQGVEGGGGYGTPCLGCFCGACGLWAPTSMGLQEP

SEQ ID NO: 34180 - protein, 110 aa, Homo sapiens
MPRWVLWAGARARFWAEASPGNPVSSLLASDPVWSGLHGCRAWGGKFRSWLCLCLMWMSSSHAQGHLRLSLLSPGYWEESLRASLPLLPCPGHTLYLLICSSPPCRLLGR

SEQ ID NO: 34181 - protein, 28 aa, Homo sapiens
VGSGLGSALGRLLLHLLSAGLRDTRATL

SEQ ID NO: 34182 - protein, 104 aa, Homo sapiens
LAQAGLSLMLGVPLWRWGSPSPCAAALHRPCRNNTSWTSSLGPRPGAGQAEEPSGQPCPQSCPPRASYPLPPHPRWPQTRQGSSCLRSPSLLPPSFSSSLSSHS

SEQ ID NO: 34183 - protein, 156 aa, Homo sapiens
VCLFAAVTMPFPSVLEWLLADASSPCSLLSNCNLNAPSGSPGISLRIFFLFLRQSRCDAQAIAQWRDLGSLQPPSGSRGSSTARNFLLLTQATVFCVAGLQEVRPALQATPVLGLLLSSSFLRVTEPGREVGCGLPCPYSRLLQLPPCWTHQQQSK

SEQ ID NO: 34184 - protein, 215 aa, Homo sapiens
VCLFAAVTMPFPSVLEWLLADASSPCSLLSNCNLNAPSGSPGISLRIFFLFLRQSRCDAQAIAQWRDLGSLQPPSGSRGSSTARNFLLLTQATVFCVVWAPAADIPHMSVCLLVGLTNSSTWSLMPNQVQTTLLFCVTLCEASCKLDSLPSAPSPKAGLQEVRPALQATPVLGLLLSSSFLRVTEPGREVGCGLPCPYSRLLQLPPCWTHQQQSK

SEQ ID NO: 34185 - protein, 38 aa, Homo sapiens
MHTASMHVSHTLATLAASALQSPSPRPLVGSLVHTGGK

SEQ ID NO: 34186 - protein, 52 aa, Homo sapiens
VVFPAPQTPAGSSRAELRADKARSERPLTGARPLLRALAMMCGSSLLLLGNC

SEQ ID NO: 34187 - protein, 83 aa, Homo sapiens
LNSVHAGLELRPCVFSRLLIRRGALGAPAWVAVPSVCGPQFLGGAWTLALRGRPVPRSVATDPRTLFAGDSRSLRLPRMMACD

SEQ ID NO: 34188 - protein, 123 aa, Homo sapiens
LNSVHAGLELRPCVFSRLLIRRGALGAPAWVAVPSVCGPQFLGPRRGFVGAPGDIWAVLAVSGSRARSLPGLTAADLVLHFLGGAWTLALRGRPVPRSVATDPRTLFAGDSRSLRLPRMMACD

SEQ ID NO: 34189 - protein, 170 aa, Homo sapiens
LASAFLFSLLIILFLAAESEVSPCGGLAPITWWSDSYPSLRLHWKISQPQCMGNPFPRLVPALPLPTPEPGPQRMAMPRAWQRSGASTGSCSALALGPREPSSTPAQQLGTEERSSILTRTAPRSTRCLQPPTSGATFSSSHSPMRAPSQGHWSVNCNPFSSPALHLFLV

SEQ ID NO: 34190 - protein, 154 aa, Homo sapiens
LTIFLLLSSLSSYLAYLSIHLRVCLQPPPVCPSVQLPVTLCIFLSIHLPTHPSLRLPTSRPSPPGLQSHGPGLRGHGQPSPAGSGAGAGCHCAGCGPLSTPGPMWPPGLCPRCCCRRLQGLLGYWTVSETWEEAGWPLAASPSWRRRVCVCVCE

SEQ ID NO: 34191 - protein, 32 aa, Homo sapiens
MPRAGLIGPSGGFSVPQAAVAISGADWLVPWP

SEQ ID NO: 34192 - protein, 58 aa, Homo sapiens
VLFPCSETCLSGKLLFGILYHVGSLFPLVIVNGNFSACISLDFFFFLPIICFRDSFLA

SEQ ID NO: 34193 - protein, 37 aa, Homo sapiens
VRGAASPRLATCGFYLLAILLCGRVVLTLHPRGPFLA

SEQ ID NO: 34194 - protein, 33 aa, Homo sapiens
MTTDARVSQPIAAETFPERQNIQLTHGLMGDHG

SEQ ID NO: 34195 - protein, 12 aa, Homo sapiens
MFGGLSLTAFLA

SEQ ID NO: 34196 - protein, 31 aa, Homo sapiens
LSRVGNTGRLLSFTLPSFQTCLMVATWFLNN

SEQ ID NO: 34197 - protein, 28 aa, Homo sapiens
VIMMMNLVPSLFFIALPHQQSALSHQAS

SEQ ID NO: 34198 - protein, 64 aa, Homo sapiens
LPLYPLHRKWAGSGLLVFAAPAARAQQGPGEMATVPAPGRTGERALPPPHVSARASFLGSTLWM

SEQ ID NO: 34199 - protein, 16 aa, Homo sapiens
LRLLIGASFLGSTLWM

SEQ ID NO: 34200 - protein, 11 aa, Homo sapiens
LASFLGSTLWM

SEQ ID NO: 34201 - protein, 169 aa, Homo sapiens
LRPGTCKFAGAASQAPHAPAFLRARGEPQDPLSHPRVPAVSANCRMWKHLPVHSSPTPRLTPLWKLQARWLLPQLVYLQGWGSYSLLRPAALISMVLLAREFLYPAKMSVSEVCSSGLSSPLLEQHKTNLIFYASGDICSANGKSGFNQPLPFLKTFCCTHRILSCTYL

SEQ ID NO: 34202 - protein, 50 aa, Homo sapiens
VASEPLSNMPAENSSGGGHRHLRDAERVRASLGVSMVLPLACSISTSSPA

SEQ ID NO: 34203 - protein, 50 aa, Homo sapiens
LGHVSCLIACWSCKQALSSTVPVPCPNLAPSKYRRPSFPPFSILLSVLSG

SEQ ID NO: 34204 - protein, 100 aa, Homo sapiens
MLTEQHALLAPACTSASRAASELREDPAGAPSSAVWGAEVWRSWGAAMQIPTYPAGPEARGSQAGWEQGLAWEVWGTDKDDGPLRGKTRIRDRSGGPGHG

SEQ ID NO: 34205 - protein, 59 aa, Homo sapiens
MPLHTLFSPPATFSPLLLPLQTPMQPSRPHSPLESLPDPLGNNHHQYLFTEPTLCQALF

SEQ ID NO: 34206 - protein, 89 aa, Homo sapiens
VVVVGLGHPFLVLSLVMGLLLWPLDQLGTGGLQASVSLSVCVSSLHMASLLPPPGRPPGLHHLPYPEALWAISHPPSYSLTPSIHLSHL

SEQ ID NO: 34207 - protein, 93 aa, Homo sapiens [sequence omitted]

SEQ ID NO: 34208 - protein, 83 aa, Homo sapiens
MRRLDSFCRPQGRGRCQPPGMSLPEPQMPQAIWTPPVQYLCYNKMYPDLSPLTWATANVPCGPIPRPQEPRGSFFLKIFRPHR

SEQ ID NO: 34209 - protein, 23 aa, Homo sapiens
MEFAVLPRFGVNLLTHGEEGHFP

SEQ ID NO: 34210 - protein, 219 aa, Homo sapiens
MWPRPRAPPETSGAHRGLGKILRDLTAQVFHPWPPPQVMPEAQGTVSTLRPCPWLWIGGPHQRPGLSPQGSTQVLWAAWGGAGWTPRWPVFATWPWVSSSLEETLPQTPAGHPAKPLRPGKVSGCHPTPRPDSSPCGSWTEHSVTTKRSLPRPCLHPGKTQPGMGRRNAARLPAQTRVAPHARPGPHPPGAHGSPRLPGRKSPPPQKGWSLVGSCCWVG

SEQ ID NO: 34211 - protein, 55 aa, Homo sapiens [sequence omitted]

SEQ ID NO: 34212 - protein, 52 aa, Homo sapiens
VRFYFLFSIISKTATGNYMTLQARVGIAVIISVTAVVSHFILYCVVLCHQKQ

SEQ ID NO: 34213 - protein, 10 aa, Homo sapiens
MWFCCLWALL

SEQ ID NO: 34214 - protein, 68 aa, Homo sapiens
MWSAAPLGHLSPASTPPGTAASSPTTQHPGKWSRSWWPLGSRPLASVPSTTWAPTPSASPSSSCSALS

SEQ ID NO: 34215 - protein, 230 aa, Homo sapiens [sequence omitted]

SEQ ID NO: 34216 - protein, 40 aa, Homo sapiens
VGPLGRLLWCWAGVPGAAAVPTSVCWGRAPWRENMEPLLA

SEQ ID NO: 34217 - protein, 16 aa, Homo sapiens
KLVFFGGGFSIVLSMC

SEQ ID NO: 34218 - protein, 11 aa, Homo sapiens
MVAVGWTWLMG

SEQ ID NO: 34219 - protein, 29 aa, Homo sapiens
MNLASRPCFSLFFIHIHSQHLRRCCLIYF

SEQ ID NO: 34220 - protein, 36 aa, Homo sapiens
LVAKGRRRGLSFRGSLPFLCCRSVTLALSPCLDHFL

SEQ ID NO: 34221 - protein, 60 aa, Homo sapiens
LKKLCPSAALILCLALLAWCRACCLLTLTMSCPGPDPPEGPGTQRVWQGALRILQLPGAP

SEQ ID NO: 34222 - protein, 51 aa, Homo sapiens
RSRHHGFLQSSAGGASTLGLPAARGQGLQCAPLHFPAHSWGQSGAGRSGRG

SEQ ID NO: 34223 - protein, 9 aa, Homo sapiens
LLVVFPALL

SEQ ID NO: 34224 - protein, 32 aa, Homo sapiens
RGSRRACVSRTNSGSAVWLLCCCSWTGWADRC

SEQ ID NO: 34225 - protein, 43 aa, Homo sapiens
ITISSNSSSKHNSISCFLLLSFLILSKFSDSRKRNHSPLPPTT

SEQ ID NO: 34226 - protein, 54 aa, Homo sapiens
LTSVYLRVRPILPAGLCLGVTLPELAPTTVATVMLMCDCCQEPAHMTVWRKFFP

SEQ ID NO: 34227 - protein, 9 aa, Homo sapiens
LLMIFFLEL

SEQ ID NO: 34228 - protein, 43 aa, Homo sapiens
LLSQDCESGLGFSSLHSTAALVIATCLLITEESQVLRRGRNTH

SEQ ID NO: 34229 - protein, 7 aa, Homo sapiens
ISLLTLL

SEQ ID NO: 34230 - protein, 37 aa, Homo sapiens
ITHLPSSSIIAKIPSLHILWVSASVLISLHTPSAFLS

SEQ ID NO: 34231 - protein, 47 aa, Homo sapiens
KRHPGPSIVTSTGFSLAAGPLCAMSGLPCWLCWTGRGECWRTSSAWA

SEQ ID NO: 34232 - protein, 7 aa, Homo sapiens
LGCFWLL

SEQ ID NO: 34233 - protein, 9 aa, Homo sapiens
LGYKWLLVI

SEQ ID NO: 34234 - protein, 23 aa, Homo sapiens
IWMCPVLSCVFSALSMVSFSENE

SEQ ID NO: 34235 - protein, 47 aa, Homo sapiens
KTWTIEWSRNSPLSLTITVAFLWSSSSPRIPKTAAEFIKIKFVNVTT

SEQ ID NO: 34236 - protein, 43 aa, Homo sapiens
KPLFLSPLPTLPPLTLLLTLLEPCLPGGPISSGRPCLWATWSV

SEQ ID NO: 34237 - protein, 44 aa, Homo sapiens
RMRRRRSAVGSVSARGCGGAGGSSLSGFSLGGGGGGSVDASSAS

SEQ ID NO: 34238 - protein, 22 aa, Homo sapiens
TRGEVLSAVALRLLALISRLPL

SEQ ID NO: 34239 - protein, 28 aa, Homo sapiens
LSLHWCASGQAALLGPGPCLPTPPPSWA

SEQ ID NO: 34240 - protein, 42 aa, Homo sapiens
MNTSHSCISLPPSCIFSLCPLISVSPWEHMPPVSGPPFFFFF

SEQ ID NO: 34241 - protein, 15 aa, Homo sapiens
LRRGFTMLLWLVSNS

SEQ ID NO: 34242 - protein, 11 aa, Homo sapiens
LTLSLCCLLLS

SEQ ID NO: 34243 - protein, 184 aa, Homo sapiens
VSPRKVWAAFLTLDACGQPSSPWMPVGSLPHPGCLWAAFLTLDACGQPSSPWMPVGCLPHPGCLWAAFLTLDACGQPSSPWMPVTWFPWGLPKLRDPKPPSNLMTRLVSEHTCVVPEPLTNPLCNPAHAFPILKGPAHRPAHVFPLPLLCPYLVGSCPFWALVWHFTHKCVLWVVSGPPPAVRG

SEQ ID NO: 34244 - protein, 101 aa, Homo sapiens
MAPPPSSPCSPSMAAARFSSVLWTTVTVLPWPTMAATSPTPAPATFPGQCPRRSTHTRSRPHPPSPSPFPAWRSETGLTPPSSPATRISTGCMGSRPPNTT

SEQ ID NO: 34245 - protein, 80 aa, Homo sapiens
MGHCCVQNPGSSFCLQLLSLDAPETIQASFPILPLCFAFYPSTSITAFSSFQNSLFLVLFFMITKLLLPPWKITAIDACM

SEQ ID NO: 34246 - protein, 39 aa, Homo sapiens
MNGGWKMWSALIRICVRLLATQQPRRASLQASARVPSAR

SEQ ID NO: 34247 - protein, 74 aa, Homo sapiens [sequence omitted]

SEQ ID NO: 34248 - protein, 94 aa, Homo sapiens
LGKGLLGLLVNFCGHHLLLLTSLGGCYQFCPGPFSFISWFPAPSVLTSVCHMRREALPVWEGGYCGWNSGGLQLIRQGPPTSWRASALLIKMSM

SEQ ID NO: 34249 - protein, 49 aa, Homo sapiens
LPSLFGPRSVHAFVFVTAAGPFDVFICMGWKNHRESPFSSLKKFHDSNI

SEQ ID NO: 34250 - protein, 15 aa, Homo sapiens
LNFYGHGTDKDPVFI

SEQ ID NO: 34251 - protein, 64 aa, Homo sapiens
RLIKEHTKIGGMKHLQNCPNGPSGDPGNKCLSSHDQSFYFFLILCIWLVYMSQNQVLKQEVIQK

SEQ ID NO: 34252 - protein, 30 aa, Homo sapiens
TQLREGFVLSSVLWCRASSSPAQPRRFGHI

SEQ ID NO: 34253 - protein, 69 aa, Homo sapiens
REEMEITSPDLAFLSLFLFSPLPSDDWRVKGNPERGGEQRFEKMQECVWRRVKLPFKLWPPGTRCSAAG

SEQ ID NO: 34254 - protein, 111 aa, Homo sapiens
LKEDKIVFITKNMCSVRIRMFNCVKVGDGKIGIMAWIQKSVFHYRKWEFKDDQKTVGSRVRIRTLNCCLTFQITKKFFTMSRTLNLKAEWIESLQRGSGMVFDVGKGNMYF

SEQ ID NO: 34255 - protein, 24 aa, Homo sapiens
MGPVCRSVWAGCGSILHLPTLSCW

SEQ ID NO: 34256 - protein, 29 aa, Homo sapiens
VVVSLTLTAVILVLTRRCRTASHPVSASE

SEQ ID NO: 34257 - protein, 67 aa, Homo sapiens
TVCSMPGALPLCITSFKSFIPGLYITSWQWSSCRAIPRHRKLWALLSTSIISSSSTGKTSWTLLMPS

SEQ ID NO: 34258 - protein, 42 aa, Homo sapiens
LLFVYFLLLPRRRRRHHEGNRALAGRAVRQPNRRQVLGGDQR

SEQ ID NO: 34259 - protein, 18 aa, Homo sapiens
IQTAGASLTAYGTNHAPN

SEQ ID NO: 34260 - protein, 29 aa, Homo sapiens
MPAYLNDTRMTFKAHLKMGKPQHRIRLGP

SEQ ID NO: 34261 - protein, 30 aa, Homo sapiens
MELGVEVMEVLMTMVAIIITAMGMMALMTE

SEQ ID NO: 34262 - protein, 11 aa, Homo sapiens
VQGQRLKRLLY

SEQ ID NO: 34263 - protein, 28 aa, Homo sapiens
LADSVGALNQERTRKRMGRTDPHSHQEV

SEQ ID NO: 34264 - protein, 49 aa, Homo sapiens
RELPLTDTDNSKGTWSSLCLIVVGHTAQEEPAMRPANALTISLSHQEEA

SEQ ID NO: 34265 - protein, 28 aa, Homo sapiens
KPPPMSSTREACLWALAWTLAGREARGF

SEQ ID NO: 34266 - protein, 110 aa, Homo sapiens
MPCCKGWGASVWLPCHHKTCGFQLCLHPGPTNQQQERKQLCTQADAHTRTWPPRRAQPSEEVEHQMFWVSCSTLPQLVESVVVVCLSRAHVRDKSWADGKPLLSAPTPQL

SEQ ID NO: 34267 - protein, 45 aa, Homo sapiens
MGRQWMTYLWRETTHSRTSSLLKAEHSMGRPVCREEPATPGSPFC

SEQ ID NO: 34268 - protein, 40 aa, Homo sapiens
MRRSCSIQRLWKRVPGSSLFQRQTSSLCLHSRMTNYNDYT

SEQ ID NO: 34269 - protein, 18 aa, Homo sapiens
MCLGWFFFFFSISLRRFP

SEQ ID NO: 34270 - protein, 28 aa, Homo sapiens
MIATLLPAHTTQRGTGVMGESFKPTHQA

SEQ ID NO: 34271 - protein, 10 aa, Homo sapiens
MNSSKARNLF

SEQ ID NO: 34272 - protein, 43 aa, Homo sapiens
MAIYNSRKAASEETNLQTSLSATPCLPNGVKRQKGNEFPRRPA

SEQ ID NO: 34273 - protein, 27 aa, Homo sapiens
MRAYRMGGGPRRGTIIAKTRGPEEETF

SEQ ID NO: 34274 - protein, 66 aa, Homo sapiens
MPIAAPVPVTWGVAAEGTAAWDSRELGSLSSLQGHHFLWALGQVTVLSESQFPHLQNGNNYPGLPT

SEQ ID NO: 34275 - protein, 21 aa, Homo sapiens
MFLLIPLIKQGHFARVLMGNH

SEQ ID NO: 34276 - protein, 83 aa, Homo sapiens
MSSRHLSALWISSATKCQRVWRLILPSLLQSRTRDSRKLLLHRSPTVPASVPVHTGSSRGLWLPTNSICKWSISLHLYCLTII

SEQ ID NO: 34277 - protein, 33 aa, Homo sapiens
MEVPPRLGRVRSHQDAQRVSLILSQVVELSKPS

SEQ ID NO: 34278 - protein, 84 aa, Homo sapiens [sequence omitted]

SEQ ID NO: 34279 - protein, 47 aa, Homo sapiens
MELIATKVFYKRTLKSPQMLTALIISPTAPDMLASSLSWAMWPGNPS

SEQ ID NO: 34280 - protein, 16 aa, Homo sapiens
MQYQSLHGTISTTLRS

SEQ ID NO: 34281 - protein, 11 aa, Homo sapiens
LMWIQTFLSVL

SEQ ID NO: 34282 - protein, 11 aa, Homo sapiens
IALYIVCYLTR

SEQ ID NO: 34283 - protein, 41 aa, Homo sapiens
MLALHSILQWPPLLQQMQSFASTCSERWMTIKEMEMCSFPL

SEQ ID NO: 34284 - protein, 19 aa, Homo sapiens
ILMEIKWRTPLTLSSMLLT

SEQ ID NO: 34285 - protein, 32 aa, Homo sapiens
MRDGTHPRGMLLQSFYRASAVAHACNSCTLGG

SEQ ID NO: 34286 - protein, 48 aa, Homo sapiens
MQRRQWDNWARSIPGRGNSQCKHGRCGCSEKEQRRPGVEATAERLQSS

SEQ ID NO: 34287 - protein, 40 aa, Homo sapiens
RSSPPRAPAATASPACMFAACLVPGTRSSSRTAMPWTWAR

SEQ ID NO: 34288 - protein, 64 aa, Homo sapiens
LISHSTTALHGFVCFFTAHSQPFVMPFSKLISECSLSLKLCNTKITRTPKQQPKIYCGMHLINL

SEQ ID NO: 34289 - protein, 35 aa, Homo sapiens
MMPRKRRCCPTWGPILAATWSRQNRSVVSGRRGGR

SEQ ID NO: 34290 - protein, 31 aa, Homo sapiens
LLPSMGAALAEVWTLSPPVTSGTVPRMLSSR

SEQ ID NO: 34291 - protein, 15 aa, Homo sapiens
LSTQVWLPGLLLLRV

SEQ ID NO: 34292 - protein, 43 aa, Homo sapiens
ILSLRCWTSLLLLIPLTSCNFSSPSWRMTASQVPSKRKASMTL

SEQ ID NO: 34293 - protein, 40 aa, Homo sapiens
IKEMALMWTNGIILPGTAIILESKIILITSALLSLPVSVK

SEQ ID NO: 34294 - protein, 10 aa, Homo sapiens
MGPCLLFFLL

SEQ ID NO: 34295 - protein, 32 aa, Homo sapiens
LCPLGWKGQDSAAAFAFLFLNFIVLISFLPNR

SEQ ID NO: 34296 - protein, 94 aa, Homo sapiens
LSLEAQPQVLELQRDPKGSRLCQIQMGPIQCFILLQSLSQTVSPRSPSSGFCVPHGLFPASLLVPLLRIHLSIQCFLGLCSEAGHHWALWINAR

SEQ ID NO: 34297 - protein, 10 aa, Homo sapiens
IKSLIRIFLM

SEQ ID NO: 34298 - protein, 15 aa, Homo sapiens
LGLLMIVVLRLAEDL

SEQ ID NO: 34299 - protein, 19 aa, Homo sapiens
LPDTINQALVTWLCLCPAV

SEQ ID NO: 34300 - protein, 130 aa, Homo sapiens
LLLMIAMTLRLMNSLAKRILDVEDRKSLWGQADLDSNTSQFCLLCLSLSLLICEEEVARMKMPALWFVVRTDTANVEGPAAHRPVALRADHSCLDGRELFLCVASGTLGRKATVRLLRRTLHKGVSSQGR

SEQ ID NO: 34301 - protein, 37 aa, Homo sapiens
LRENLKILLGGLLALRYRWGMSSSFPAIKAMTRESEY

SEQ ID NO: 34302 - protein, 68 aa, Homo sapiens
MSHMVPLALLLPLFPTSRRAALPFLPLFFGLMFPATTDLPPPHPSADLAVHCRHGGLISDRKLRLSER

SEQ ID NO: 34303 - protein, 12 aa, Homo sapiens
LGPVLRLILCFS

SEQ ID NO: 34304 - protein, 38 aa, Homo sapiens
RRTRRASRRRTRWAPCWVAAASARSTRVAASPTGSRWL

SEQ ID NO: 34305 - protein, 17 aa, Homo sapiens
ISSSITIRLILILFHGH

SEQ ID NO: 34306 - protein, 47 aa, Homo sapiens
MLAAPSQALGPPSCLALADGHLCWFHQPELCQRPRSPSPRRTLEAIK

SEQ ID NO: 34307 - protein, 25 aa, Homo sapiens
TATATAAGTAAVAGAAAWTRLALAP

SEQ ID NO: 34308 - protein, 8 aa, Homo sapiens
LVLLMWCM

SEQ ID NO: 34309 - protein, 14 aa, Homo sapiens
KPRTKWMFMVMLSS

SEQ ID NO: 34310 - protein, 15 aa, Homo sapiens
VASGMCCWLLQVLLE

SEQ ID NO: 34311 - protein, 19 aa, Homo sapiens
IMVYLWLAMVILMGKNTGL

SEQ ID NO: 34312 - protein, 42 aa, Homo sapiens
MAKAGSIFIIILTSTFQKPHSKTAAPTSAGGFLGVKMCLQRL

SEQ ID NO: 34313 - protein, 9 aa, Homo sapiens
ILGLLLGFT

SEQ ID NO: 34314 - protein, 47 aa, Homo sapiens
LKPTVLGFLACGISLVGLHTKPCRSAAFPDSPVLSECKGLPCRRCVL

SEQ ID NO: 34315 - protein, 22 aa, Homo sapiens
MVIISLCVLRCLVVVEDGVFYE

SEQ ID NO: 34316 - protein, 24 aa, Homo sapiens
MLMTKELILKSAWLFLISSITMSV

SEQ ID NO: 34317 - protein, 19 aa, Homo sapiens
LGILFLLWMQNMPTTILEK

SEQ ID NO: 34318 - protein, 12 aa, Homo sapiens
IDTWLLSMLCLL

SEQ ID NO: 34319 - protein, 10 aa, Homo sapiens
VLLSSWLLFL

SEQ ID NO: 34320 - protein, 25 aa, Homo sapiens
RRSMKTKNMLVLLFSQNSLQELRRH

SEQ ID NO: 34321 - protein, 12 aa, Homo sapiens
LCVFFFSFFPSM

SEQ ID NO: 34322 - protein, 19 aa, Homo sapiens
IAATLSSLASFTFSFSLRC

SEQ ID NO: 34323 - protein, 32 aa, Homo sapiens
VVLVLFLLAEWRLVFSNPVWWSPLLQSTLQRK

SEQ ID NO: 34324 - protein, 30 aa, Homo sapiens
MCLSRMFVVATLLVTAKMTHQWKQLASLLR

SEQ ID NO: 34325 - protein, 64 aa, Homo sapiens
LWSTLAPLLATSSGPAPTLTGHLWRLCLSQGPWQRVGHCTLPHPSMPALLHYGHSPLGRSSASL

SEQ ID NO: 34326 - protein, 25 aa, Homo sapiens
LDMMILMSPTVLSTLSHVLLQLPAT

SEQ ID NO: 34327 - protein, 15 aa, Homo sapiens
ILLVMLLHFTELMIT

SEQ ID NO: 34328 - protein, 9 aa, Homo sapiens
KSPGASAIW

SEQ ID NO: 34329 - protein, 44 aa, Homo sapiens
MPVAVPTQMWLHFLMATGWSATECPFHGCPEPRPLLQCLGGSYP

SEQ ID NO: 34330 - protein, 19 aa, Homo sapiens
TLFFLKKYTSCLLYFALGT

SEQ ID NO: 34331 - protein, 14 aa, Homo sapiens
LELGLLLATFLSVS

SEQ ID NO: 34332 - protein, 22 aa, Homo sapiens
IEHVLLNFLGSSLLIIQLTLLA

SEQ ID NO: 34333 - protein, 10 aa, Homo sapiens
IWLNYLSLIC

SEQ ID NO: 34334 - protein, 17 aa, Homo sapiens
LSTCWLSLVAALWDCVK

SEQ ID NO: 34335 - protein, 40 aa, Homo sapiens
IFGCPSREKGSAFMFQDATGVILFNATILPISLTLSTTQY

SEQ ID NO: 34336 - protein, 11 aa, Homo sapiens
IVLLIQFCTVL

SEQ ID NO: 34337 - protein, 141 aa, Homo sapiens
VKEKPRILLLFWIIFYRRDHRNQSLLPRPALLGFGRGTHQPLVFYFFKKPSPEQPKIPLRWGPTALWWPFGENCSPARQLGPECNPSSTPAWRPGPQPWPGGQASPCGALKEGGHEPTPHPSANRGMAPSAFPVPVSNPTQ

SEQ ID NO: 34338 - protein, 55 aa, Homo sapiens
LWPVKGAHMCQSTLMLLWRTLPKVRAARYPTSLNLILSTAASSLFLPCCERSNYS

SEQ ID NO: 34339 - protein, 35 aa, Homo sapiens
LFLSCFLGVAPSCLCCVWKWRTRQIQTPCLNYTDL

SEQ ID NO: 34340 - protein, 21 aa, Homo sapiens
LQWPFMWLAVSLVVTSTQLCL

SEQ ID NO: 34341 - protein, 27 aa, Homo sapiens
LDLLRYAVFILQVVIQSCLLLNHFQAL

SEQ ID NO: 34342 - protein, 27 aa, Homo sapiens
MGPRLALISVGSCVASTWTKMGRQSCC

SEQ ID NO: 34343 - protein, 22 aa, Homo sapiens
LKRCMTICISLLTESSLSCTRI

SEQ ID NO: 34344 - protein, 58 aa, Homo sapiens
LSVAMAMFLAGCGGPLLNDLLPCCSEDTAARKGLAHCGASQGTLVAPASDLVLSLVWG

SEQ ID NO: 34345 - protein, 38 aa, Homo sapiens
LRFKSLISSLFLLQDPEALSLSPWSSAGPWPCWGAPWA

SEQ ID NO: 34346 - protein, 19 aa, Homo sapiens
LGFLSALLALVLRARAGSK

SEQ ID NO: 34347 - protein, 23 aa, Homo sapiens
IPLKITIMAVFLCLKTVKQERII

SEQ ID NO: 34348 - protein, 10 aa, Homo sapiens
IYKILVCLAT

SEQ ID NO: 34349 - protein, 25 aa, Homo sapiens
KKLEKHSVCLIRMAMAILVLQNFAM

SEQ ID NO: 34350 - protein, 22 aa, Homo sapiens
ISREENWSVFLWFWFGCHSVLS

SEQ ID NO: 34351 - protein, 8 aa, Homo sapiens
ILSWSFLM

SEQ ID NO: 34352 - protein, 13 aa, Homo sapiens
ILSWSFLINLIHW

SEQ ID NO: 34353 - protein, 13 aa, Homo sapiens
IPHHTVPCTAKEL

SEQ ID NO: 34354 - protein, 23 aa, Homo sapiens
IWISKETTKLSSRLQALLAMWAC

SEQ ID NO: 34355 - protein, 42 aa, Homo sapiens
MVLLKETSMIASVLKALKPSLRWVPLGFTLYWQFIGKMDIRS

SEQ ID NO: 34356 - protein, 51 aa, Homo sapiens
MGNPRNQKTNCPSPQLEVAPLQKQASNSLLRKKPDESAPFVCMPSPIRVLL

SEQ ID NO: 34357 - protein, 7 aa, Homo sapiens
LFFMICI

SEQ ID NO: 34358 - protein, 22 aa, Homo sapiens
IRLSLAFILILDGLLFWVPSGC

SEQ ID NO: 34359 - protein, 32 aa, Homo sapiens
IKTVLSTMTGTASRLAGSSALGFCAPWASSSS

SEQ ID NO: 34360 - protein, 39 aa, Homo sapiens
LSFSGRMEFRRWWNLTQFKVPSGPRPLSMGLISILAVAL

SEQ ID NO: 34361 - protein, 37 aa, Homo sapiens
LVKVIASLFCLKPSVAAHHTRIKWKLLTIGSSLCPPL

SEQ ID NO: 34362 - protein, 49 aa, Homo sapiens
LFVIKRGQRSLTHRGTWGGTVLLAQACQRLVTVGPPPFGLTPRPPHEWY

SEQ ID NO: 34363 - protein, 60 aa, Homo sapiens
MRFKASAESGLGSLGERTPSALVLTCLPAPSASCQQRPRLRNCHSSSGCCTSFEVTGDPP

SEQ ID NO: 34364 - protein, 81 aa, Homo sapiens
LYKVLVCVLPLCLLSSFLSLWLASLEALGRCPCCASVCFMFSGEVIMPFFLSSYFRYPIECFLLPGRVRKLCVSGDHGYHS

SEQ ID NO: 34365 - protein, 38 aa, Homo sapiens
LGTGVFLFAVLPSAGSSVLFPLEKYLCAPEPNFSQMHI

SEQ ID NO: 34366 - protein, 81 aa, Homo sapiens
LVLGSQPGVAALLAAGFTPTSSWLKAVLCFEMQPMNTQSDYPDLGRPAVLARVVWPAMGDPGGVTCPFHVLGAFSPTKHLQ

SEQ ID NO: 34367 - protein, 73 aa, Homo sapiens [sequence omitted]

SEQ ID NO: 34368 - protein, 24 aa, Homo sapiens
MVTGTPVHCFDLKIEVHYSDRKLI

SEQ ID NO: 34369 - protein, 12 aa, Homo sapiens
LGPELTEWAATD

SEQ ID NO: 34370 - protein, 35 aa, Homo sapiens
MVEPVPGCKASWDARSSGWKAGLEFSLGRWVTSVH

SEQ ID NO: 34371 - protein, 45 aa, Homo sapiens
VGVSPGHIELSRGTLFPWLHGPEDARLSPLESVFRRPRGERKVLG

SEQ ID NO: 34372 - protein, 96 aa, Homo sapiens
VSLPAPCHALARTAAVTLVTTASAVIHAHVPSVYMSFGCQDSSWGEGWEWRVAGRSKALWRGLGPGPQQPGWLYVASDTLIPCPELRFWVGLQPHD

SEQ ID NO: 34373 - protein, 45 aa, Homo sapiens
MEFKPKEWRVPDERYVRSRVRSKLDALLGWQVQNVPDPSVPAWIS

SEQ ID NO: 34374 - protein, 65 aa, Homo sapiens
LLFFPPATVQGRRYFSRLSLMGAFLLATSLKWNLLVALLPLQLWCYTEKLEVSKQTREKEKHQKV

SEQ ID NO: 34375 - protein, 44 aa, Homo sapiens
MLFYFGTCSGSRIKNLRWGKKALLSLTLIFCRYFVTQEDLIYSQ

SEQ ID NO: 34376 - protein, 72 aa, Homo sapiens
LLLETAAAAAAAAARGLPAAGAEVLAARAPRPLPTARRDAHSPSTRKEVPSPVTGSCRVQIYTELHNQPKTT

SEQ ID NO: 34377 - protein, 98 aa, Homo sapiens
LTLSYPFCAKMDSIGKMIPQLLILWLYIALETLKHQMELNTYLKFRLGNIGEEASKRGKHLLSGRIFSILWISLIFFYHPEGWWELSFCYILEVIQDF

SEQ ID NO: 34378 - protein, 50 aa, Homo sapiens
VPPCLTNFCIIFVETVFCHVGQAGLELLDSSNLPSVASQSAGITDTSHLT

SEQ ID NO: 34379 - protein, 96 aa, Homo sapiens
VVLSLSLSLCLAPGSAGSSRRLSRLRGPAPRPPRYVLIPSSGFHGAPQDYDAAQVAAAGGGGLRGGDALLGKPDPETGGVPLEARKGYCKTRSPRN

SEQ ID NO: 34380 - protein, 118 aa, Homo sapiens
LVILRSLCISWTALLELSSKSTVGWVGGSADFSLDFHIWDELAVISSRKGVAVLHWLFSSHSSSRRALRDFISVLLMKSTFIQGLLWKTSPKVAEQKTFESQQKSSTLHGSLDVKSSI

SEQ ID NO: 34381 - protein, 52 aa, Homo sapiens
LCRCLKRYLLCLITWLLFPTCTMTKMPSTYLIQPFQYNSYTCHLSKPKGTSS

SEQ ID NO: 34382 - protein, 95 aa, Homo sapiens
LVILRSLCISWTALLELSSKSTVGWVGGSADFSLDFHIWDELAVISSRKGVAVLHWLFSSHSSSRYCNKELEKYSQMGSSPCCQGACHLMGETGK

SEQ ID NO: 34383 - protein, 10 aa, Homo sapiens
LLPFFFLFSL

SEQ ID NO: 34384 - protein, 46 aa, Homo sapiens
RLRVMESRTLLLLFSGAVALIQTWADYNYNQGRNDLIFTLQLWKRQ

SEQ ID NO: 34385 - protein, 53 aa, Homo sapiens
LRPISAHGMPGWTTSGSGAFPGSCGGAIASQPTLSLSVTQRCPLGRTLMGGTG

SEQ ID NO: 34386 - protein, 92 aa, Homo sapiens
VCISIVYILYTLLHRHTNAPIYTGQEHNHVIISTKELRNPARKDIGGGLALKLLFKTRKRRRKRKKRKMLGNIYLTCSTARTLASCCYSCKY

SEQ ID NO: 34387 - protein, 35 aa, Homo sapiens
IWWRKLWSRRQWRKWGLWWEEPILSFFLFAMGFTV

SEQ ID NO: 34388 - protein, 62 aa, Homo sapiens
LLGPLSLCGVYICFHKSVLFFSLFCLCISSNCLFKMPRIWTPSTSNRHWEGEGRKAECKMKW

SEQ ID NO: 34389 - protein, 40 aa, Homo sapiens
VAGLGMELSALCVGGLGLCLHPAQGCPSLGSPAWLLLGPE

SEQ ID NO: 34390 - protein, 8 aa, Homo sapiens
LGLMVCLF

SEQ ID NO: 34391 - protein, 45 aa, Homo sapiens
MVPLFHLPPLMNLWITQLCTGLPAAAVSVYLGSCPWLSGWDGTWT

SEQ ID NO: 34392 - protein, 42 aa, Homo sapiens
LLFLVWRRSQWPNCRMKEQCGRSVLWMTTSAWPLQASPPMQG

SEQ ID NO: 34393 - protein, 40 aa, Homo sapiens
MRVTASRPPSTIFSPSCLSTSLSSSRKLPTLTSCSSSFCS

SEQ ID NO: 34394 - protein, 33 aa, Homo sapiens
MTRTVPSFTAILNSPSTQHIQLNQSKSSFPAGK

SEQ ID NO: 34395 - protein, 74 aa, Homo sapiens
MTIFHIFKTILVLLDLSRSPHHITQPLCPMGGQTVFQCRRKGCKVRAVCEEGTNESYCEKVCMVKKWITKNKAS

SEQ ID NO: 34396 - protein, 81 aa, Homo sapiens
MGTALEVTPLSSGIWIRWGLLQTSVLSRCDRRPLECSPGSSTGPSRWELRGNRGSQRGTWSTSPGPSTLPAFPALHWIKPV

SEQ ID NO: 34397 - protein, 23 aa, Homo sapiens
MPACCSVCCFLVSHLLTSWYNQL

SEQ ID NO: 34398 - protein, 36 aa, Homo sapiens
MVSSWRSLSSRFQTALFFVVSSNGRKRGGCWRKGGE

SEQ ID NO: 34399 - protein, 75 aa, Homo sapiens
MPSQFLLPLGSSFPADSRSLSTQIKRDLLSGRGAGGSTQHDHRGSAGPSIVAAAAAPAAHPASHRLRPRALLHPV

SEQ ID NO: 34400 - protein, 18 aa, Homo sapiens
IALSSCAWILEKRTVLRS

SEQ ID NO: 34401 - protein, 17 aa, Homo sapiens
MKLVFFGGGFSIVLSMC

SEQ ID NO: 34402 - protein, 52 aa, Homo sapiens
LESPAAVGLLLLLWLSLPVRLPSFVVSQRCAGLLLAALRIQGVGCQVQDLQL

SEQ ID NO: 34403 - protein, 37 aa, Homo sapiens
LPPSPAALLLLLRLRLLVPRLREPSSPPPPPPGCGGC

SEQ ID NO: 34404 - protein, 13 aa, Homo sapiens
LGSLSIFFFLTAF

SEQ ID NO: 34405 - protein, 13 aa, Homo sapiens
VGRLPLLFPLSFL

SEQ ID NO: 34406 - protein, 37 aa, Homo sapiens
VVSARGMARKRPGMPATVVSQVSFVHSISLCTTTLQG

SEQ ID NO: 34407 - protein, 22 aa, Homo sapiens
LVTLSLPPQRRRRDLTAKMTVS

SEQ ID NO: 34408 - protein, 32 aa, Homo sapiens
VPTAAIAVGGYFLGGVSSVHGVTLRPLLAAPA

SEQ ID NO: 34409 - protein, 8 aa, Homo sapiens
ILTAVIVF

SEQ ID NO: 34410 - protein, 23 aa, Homo sapiens
IGLVARLLSFLVYDFRLCGIRLR

SEQ ID NO: 34411 - protein, 45 aa, Homo sapiens
LAGFPVAVRCAAGLAALQSFVMVTSDSPAVVNVKPRRSDALSEHV

SEQ ID NO: 34412 - protein, 49 aa, Homo sapiens
MEWIIREAMDQLEEWEWGTITVEDMVLLMVWVVMAVVVEAVEVTMGKAA

SEQ ID NO: 34413 - protein, 38 aa, Homo sapiens
LSLLQACSVWWLGSANPRAHRVGAAGKLLPLPAGRRHA

SEQ ID NO: 34414 - protein, 10 aa, Homo sapiens
IFLLLSVLMH

SEQ ID NO: 34415 - protein, 14 aa, Homo sapiens
LMFLLWLCLFSVLL

SEQ ID NO: 34416 - protein, 75 aa, Homo sapiens
KTWMKDDDFLNRKHKKVKKRSNKMILMNMMMTTLQPQLHFSHSLFNLSKVIFLQWHSQDCHQYQEHQECLQAYLH

SEQ ID NO: 34417 - protein, 15 aa, Homo sapiens
LFFIIALYIVCYLTR

SEQ ID NO: 34418 - protein, 37 aa, Homo sapiens
ISSQSPVSRLSPRRSLLPVLPPLCSVLVSAFIPEWIW

SEQ ID NO: 34419 - protein, 91 aa, Homo sapiens
KNRGGCLLLLVLHPSRHSAVSCLGVAAAMARKALPPTHLGQSWFCSCCRDTELAISALRARTATGSPGSCRCTAGPLPCASALESCCCRVT

SEQ ID NO: 34420 - protein, 44 aa, Homo sapiens
MLSRGWLLLVQVLPPTPRISARLCHGGQRPPRVKKKNEPFQSGQ

SEQ ID NO: 34421 - protein, 28 aa, Homo sapiens
MSYLHWGISITLRFLLLMRTLSAYAKKF

SEQ ID NO: 34422 - protein, 54 aa, Homo sapiens
MRNVHEVTLWRLPVTGSCERHDHPRGGADAKCSPHPILFLDTQEDDISSDMPHL

SEQ ID NO: 34423 - protein, 41 aa, Homo sapiens
MAQPTAGRAGGAGARCGAGIQRTRSPPLAFVVLRFSARTLC

SEQ ID NO: 34424 - protein, 59 aa, Homo sapiens
MWCLAAIVNRPWRGHRKGLPATHDLLRACLLTYDPSSSHPSATPVRRVLFCRLRWSAVV

SEQ ID NO: 34425 - protein, 37 aa, Homo sapiens
VAAAAAAAAAAAAAEAPVAAAASPATTTKKNPHQILT

SEQ ID NO: 34426 - protein, 76 aa, Homo sapiens
RCVWLQSTQTCLWTKLRRTHKLGFLASAPQTPANMTYLGNYKKGWPYVRTLIILALMCFSSIWHLSPTLPDLSPSF

SEQ ID NO: 34427 - protein, 29 aa, Homo sapiens
LMFLSAGPIVPLLRNVSPVQGQRLKRLLY

SEQ ID NO: 34428 - protein, 39 aa, Homo sapiens
LRFNTYASICWPGWRAVAIIAHCSLELLGLGVLLTQSSK

SEQ ID NO: 34429 - protein, 24 aa, Homo sapiens
MRCCACVAGGLAVRLTASGLRLGG

SEQ ID NO: 34430 - protein, 62 aa, Homo sapiens
ILFLATSCEKTNIWVTLVSTLVLLLVIVASAAIDHTRVVIQKLVSLFICLVNFIIWFLSITN

SEQ ID NO: 34431 - protein, 61 aa, Homo sapiens
LSLFLFLEHCSCCPLPSHCLASLIGRPLVAMCPLSPASVVSLPESATIDNDLLNLPLYSVP

SEQ ID NO: 34432 - protein, 21 aa, Homo sapiens
METPRRKKRANWKRPPRKDGV

SEQ ID NO: 34433 - protein, 45 aa, Homo sapiens
LRRAIWGLLCLMVAEENQEASLRKLAVRRKFWRLGRATQRYSVAW

SEQ ID NO: 34434 - protein, 53 aa, Homo sapiens
VIFLLLLLLLLPPPLPLGSFAPTPSRRPAPSPTQDVRGFSKAAGKLQSSAPAS

SEQ ID NO: 34435 - protein, 42 aa, Homo sapiens
LPVPLDSTYLHLLTSTLTVLSLTLTLTIAHVNFSREDENNQG

SEQ ID NO: 34436 - protein, 26 aa, Homo sapiens
LLLQLLQLPSGPTAAAAAFFLHDENI

SEQ ID NO: 34437 - protein, 67 aa, Homo sapiens
LLERGSRCGERGGVRRGAVGAVWLLLIEFLWCSLACSSVFCISCSVMFKLRNALCGSSESHLWFSRH

SEQ ID NO: 34438 - protein, 48 aa, Homo sapiens
LPVWLLLIEFLWCSLACSSVFCISCSVMFKLRNALCGSSESHLWFSRH

SEQ ID NO: 34439 - protein, 14 aa, Homo sapiens
LVQFSMFLCVLHLL

SEQ ID NO: 34440 - protein, 30 aa, Homo sapiens
LLIFLFYSVMFKLRNALCGSSESHLWFSRH

SEQ ID NO: 34441 - protein, 50 aa, Homo sapiens
MAGSPITVAMVKMLVLSAQLPSLSQHSGQKVGLSGYHHLYPQKDLNPVWP

SEQ ID NO: 34442 - protein, 41 aa, Homo sapiens
MTLGHHFLLFSFGAEPKNVHPLSLVLWCLLIFVFVLSIHLL

SEQ ID NO: 34443 - protein, 14 aa, Homo sapiens
LLLLYTFLILGFDR

SEQ ID NO: 34444 - protein, 54 aa, Homo sapiens
LTSLGGGAFLCLLNFMRILRLNYRPLFPGKSIHQCILKKKKKKKKPAKTVSKCS

SEQ ID NO: 34445 - protein, 58 aa, Homo sapiens
MGSQLPVHRETSDKKHVAHFSSRPTPDHESAFSASAPAPQRPCLRAPAASALQWPRPG

SEQ ID NO: 34446 - protein, 178 aa, Homo sapiens [sequence omitted]

SEQ ID NO: 34447 - protein, 164 aa, Homo sapiens
VPAAAAEVGPRAGDGPAPGSQGTSVRSSCCQAEGGPGQAQVWSYLQPTGPSSGGPPLGTSYGKRVTDLVLLCVSAASVGPLRETAGGSSSSLSAEPAFSSLLLKSGPGRVRAYRPCLRSPGLQELRAAPARWRGRGRFSGRLAWTRTGLWKLPALTGLPVTTAK

SEQ ID NO: 34448 - protein, 41 aa, Homo sapiens
VTSTTRPSTATSSASLAFATTCSLSTAAPPTRTSTSSYAEA

SEQ ID NO: 34449 - protein, 76 aa, Homo sapiens
LRQLPALIHSFIHSLTSCLLNSSGLALGSSESHTLPPATCEICLETVGYSGKGRCPENPSGAGQKHRPCWAEAGMG

SEQ ID NO: 34450 - protein, 23 aa, Homo sapiens
MPDAGHLLLYLGNSCWASLWPPW

SEQ ID NO: 34451 - protein, 59 aa, Homo sapiens
VFSFLYPLLHSSPCAETQILHLSSSLLRPSLPFFPLLLLRMSLYSFARASIAKHHRLLI

SEQ ID NO: 34452 - protein, 38 aa, Homo sapiens
MGMGLNLGGLPCPRDCAHFLTGAILLPTVTAAPTKPAP

SEQ ID NO: 34453 - protein, 93 aa, Homo sapiens
LRGKPHAPIKGIFSSASKQAPMSQSHVFSFLSVLFGKETCRDVSSCQIPHFLLAQFHRSKHKHVLTGFSFLFSFLKCFIYLTRHCVFLSIFFF

SEQ ID NO: 34454 - protein, 78 aa, Homo sapiens
MKGRAVLWIWESTAKISACPVAELIRVMTGRYRAHHRNAPSMLVCCVLSFISSQLKLALLTWCTQSKNCKKTGAKPLP

SEQ ID NO: 34455 - protein, 67 aa, Homo sapiens
LLGTAVFSQCGAAVLLMKTMILTLSLFGSCISNFERYMTERSIQVNLQKQYLGNCRARIINEICKIT

SEQ ID NO: 34456 - protein, 108 aa, Homo sapiens [sequence omitted]

SEQ ID NO: 34457 - protein, 66 aa, Homo sapiens
VRAPAGSGRRGDPRRAGGLAAVATCLVASAAVGSWGDGGAGAGLAVQESQPWPPPSRIWSIWHLCT

SEQ ID NO: 34458 - protein, 109 aa, Homo sapiens [sequence omitted]

SEQ ID NO: 34459 - protein, 111 aa, Homo sapiens
LQSAFSPAGPGLALRPAPCAAASSFCRRRPVLPGFLLCGGLTLCLWELEVDKGECRGVATGFFPVAAASRDAGSVGLLLATDLGHLPAASGQAMRPPSPATQRGRRVARRA

SEQ ID NO: 34460 - protein, 31 aa, Homo sapiens
MPSETGILLILLGHCGEVLAPMWTDLGTVGN

SEQ ID NO: 34461 - protein, 55 aa, Homo sapiens
MKKSSLLLLLLLLLLRVPASSCQGGQPASSRRGARELKESQFPQNCCSEKRSLLL

SEQ ID NO: 34462 - protein, 34 aa, Homo sapiens
MKKSSLLLLLLLLLLRVPASSCQGGQPASSRRLQ

SEQ ID NO: 34463 - protein, 39 aa, Homo sapiens
MKKSSLLLLLLLLLLRVPASSCQGGQPASSRRDKLEVSL

SEQ ID NO: 34464 - protein, 53 aa, Homo sapiens
LGLQVLLVLSSSSLAGHRDFWTGNCTILFSQQGGSRDCPPRKSGGLGIWTVPW

SEQ ID NO: 34465 - protein, 81 aa, Homo sapiens
LGLQVLLVLSSSSLAGHRDFWTGNCTILFSQQGGSRDCPPRKSGGLGIWWVCSLAVAWGSVALVMTRAPGRDVLVAGGPCA

SEQ ID NO: 34466 - protein, 59 aa, Homo sapiens
MLCSLLFSLLSLGLEEHGPPREWASASLDSCLLPRARPGGPEARVPRASKIFGFKPISC

SEQ ID NO: 34467 - protein, 12 aa, Homo sapiens
LTVLSQMVFLFT

SEQ ID NO: 34468 - protein, 36 aa, Homo sapiens
LTQTFTLAWAGCSGAASAHCNLHLPDSRILLPQLSE

SEQ ID NO: 34469 - protein, 51 aa, Homo sapiens
MCCLCVLWVLGVTFSLGDGIQNSSAGAPLLHLLPGSYWDPENHPLMVFAQA

SEQ ID NO: 34470 - protein, 64 aa, Homo sapiens
MERLGEPGILRDGDLDVKRKRKTKVNRQYCDQVSDGEISSISRTLLIDMKSPSSRQNSQQETCL

SEQ ID NO: 34471 - protein, 10 aa, Homo sapiens
VISSVFCFLF

SEQ ID NO: 34472 - protein, 79 aa, Homo sapiens
LAFAWSDHSSFSLTLNVENVAIVAACVVTLLLLSNFLTLKKGRMSASECDFLLTCSLDRLFSIVFFFVIFSINNQGDCT

SEQ ID NO: 34473 - protein, 27 aa, Homo sapiens
MASLAAMLELSLFGARPAPGPPSVAAS

SEQ ID NO: 34474 - protein, 29 aa, Homo sapiens
LVLQMLLGFIGAGPSRAGPLTLPAWLHSP

SEQ ID NO: 34475 - protein, 32 aa, Homo sapiens
LHLSIWVAMAMACPPATVCPRPPQRQNEPIGS

SEQ ID NO: 34476 - protein, 64 aa, Homo sapiens
LSSERDCSGWLDLQGTLHPSCQALGQQHPLVAILCLVPGGLPIGLLGGAGRASIAQNCPKALLR

SEQ ID NO: 34477 - protein, 77 aa, Homo sapiens
MSSVSSSLSGCCFSTALLFPPPFSPGRLTLRQRREPHPLSLRNHHGGWGKFAGSGGSGHPIHRHPLPEWGQSAPEEF

SEQ ID NO: 34478 - protein, 185 aa, Homo sapiens
LLPTPSSDRDPGSRQRPGQQQVPTHHSKDLFLISTLDHRDGAAERKGCVRVSFSLFSLIFLDAFLPCSSFSFSLLSLSFFCLSPIPPHLSLAPAPSCLFLFFLLFLSYSFASPLPEPHLLISLPQHPVPSLWCVWVLAKARPGRTDGYLVRQRSPWAPTPFPPPGAAQVSRWKVRGAGRGKRSWA

SEQ ID NO: 34479 - protein, 65 aa, Homo sapiens
MFSPQELTGEGMGQDPSLCKASVTVMFQVFLMTVCLYLTVLLTNNLLGSKGQHLLSKAQEEFEEN

SEQ ID NO: 34480 - protein, 50 aa, Homo sapiens
LLVMFSPQELTGEGMGQDPSLCKASVTVMFQVFLMTVCLYLTEQLVAIYH

SEQ ID NO: 34481 - protein, 61 aa, Homo sapiens
LCSPRARVSLLRRRGLSATTSFLLSAPSPSLHPAIPTPPYLFPWSRRQSLLVCLRDSGLPP

SEQ ID NO: 34482 - protein, 104 aa, Homo sapiens
LLIFLNFSSSSFCPSCLPSLPKPSNPHPRLAVSHCPHPPSLLLFLCVWFLPSFPPFGFPESVGEGREGGPEWPSGWVGWGGASAPTPLTRRGTCLVPPREGAQA

SEQ ID NO: 34483 - protein, 8 aa, Homo sapiens
MAGLVWAL

SEQ ID NO: 34484 - protein, 97 aa, Homo sapiens [sequence omitted]

SEQ ID NO: 34485 - protein, 33 aa, Homo sapiens
LSSKLIRIVVLLCYISRPLSHCLHNDFGCIFIL

SEQ ID NO: 34486 - protein, 78 aa, Homo sapiens
LACKLPLSPGWDCSVLALLFCVTSWGVRFCLQETNFGRRMEATASLCAEKEGACFKGSSKGGLFYSPGPVCLRRGDKG

SEQ ID NO: 34487 - protein, 67 aa, Homo sapiens
VLGRSHCAAHLVNLLSVLMASPRWGTAVCRIQGPLSACNSFPWMPQKQSRPPFLSYPFALLFTPAPL

SEQ ID NO: 34488 - protein, 16 aa, Homo sapiens
LLCFLLHLALFTSICI

SEQ ID NO: 34489 - protein, 69 aa, Homo sapiens
LINNKSSLHIKEINPFQIHSYFSLIFKFYCNILLFSLYIYVYIYICIYIYIHIYIHIYILIFFYGSWIL

SEQ ID NO: 34490 - protein, 17 aa, Homo sapiens
MASLWVFFFYTNLRKTK

SEQ ID NO: 34491 - protein, 18 aa, Homo sapiens
VIFSALFMCGFLSPLPWS

SEQ ID NO: 34492 - protein, 49 aa, Homo sapiens
RWDASLLLIRFTIYCSGCFLIPVLLGPGSFAPCPAPRRGGWCGNGWARW

SEQ ID NO: 34493 - protein, 58 aa, Homo sapiens
TRSPCLALLLEIVSLFSFAVPQSPTLHPLFSPILREPIQIPLPFFPCRPSYGRERCGQ

SEQ ID NO: 34494 - protein, 26 aa, Homo sapiens
RKMLGNIYLTCSTARTLASCCYSCKY

SEQ ID NO: 34495 - protein, 50 aa, Homo sapiens
LLLLLLLLPPPLPLGSFAPTPSRRPAPSPTQDVRGFSKAAGKLQSSAPAS

SEQ ID NO: 34496 - protein, 35 aa, Homo sapiens
TGLLVAAHSLQPLHSTVQCWPCTLGLLPLPPWSCP

SEQ ID NO: 34497 - protein, 51 aa, Homo sapiens
ICFHKSVLFFSLFCLCISSNCLFKMPRIWTPSTSNRHWEGEGRKAECKMKW

SEQ ID NO: 34498 - protein, 63 aa, Homo sapiens
RIRRKRRNEVTIQPFPIRLPLLPPLISFLHTLQVVCSVIMKSIRKAFVLCGFLYFEFFDQKTD

SEQ ID NO: 34499 - protein, 29 aa, Homo sapiens
LSFPFLLKLFFLPVVGFGEIFCLFFMICI

SEQ ID NO: 34500 - protein, 18 aa, Homo sapiens
LPNTAATPSVPLLLLVTA

SEQ ID NO: 34501 - protein, 14 aa, Homo sapiens
LISLFCFLSLPPLS

SEQ ID NO: 34502 - protein, 12 aa, Homo sapiens
ILFSFLKMYIFF

SEQ ID NO: 34503 - protein, 15 aa, Homo sapiens
LHLLLIKLVAPFTFL

SEQ ID NO: 34504 - protein, 35 aa, Homo sapiens
ILTCLTPLDVGFFCLFVCLFVVFFFHSSCGPQPLS

SEQ ID NO: 34505 - protein, 37 aa, Homo sapiens
LLKIISFVLLLLMLLLLYLTWVFYNVVFNFNCQSLNM

SEQ ID NO: 34506 - protein, 49 aa, Homo sapiens
RLQETYNQHSTQTMPRPPETMCQARIALDRCNLRTAFILFSLILSHYVF

SEQ ID NO: 34507 - protein, 62 aa, Homo sapiens
IFFCLLRSSLALFFSFPISDLFQGESGFGGRGRKVGLQDQPPPTTIKTTRIFFCKFLTALNS

SEQ ID NO: 34508 - protein, 44 aa, Homo sapiens
MESRTLLLLFSGAVALIQTWAEMISFLHYNSGKGNRLRCKCAPK

SEQ ID NO: 34509 - protein, 49 aa, Homo sapiens
KGLVKGLQGDGLGGRRFLFLLPFCLCSPNVPVSPLPHLGPLFGPCGQSC

SEQ ID NO: 34510 - protein, 34 aa, Homo sapiens
KTTSMKIFMMIHFHVINSKCFLFLVICLITFSFL

SEQ ID NO: 34511 - protein, 38 aa, Homo sapiens
IGVQLLLLLVPLSNYQILNRYAVTCVGFVIKMLLIKIV

SEQ ID NO: 34512 - protein, 65 aa, Homo sapiens
IASFLLTTASTVRSPAEPGPGGESCLHGRAPRPHRRSRHHLSPSLVPAMGFVSSSALVTDLDTEY

SEQ ID NO: 34513 - protein, 86 aa, Homo sapiens
IDHDQDLVPTAQDAIDNGMVAIKDIFFPLFFFFFFNSEISPSCGFFLLLKKKTLVYLASTLLSVVLLFSTHFIILLKDVIVVILNS

SEQ ID NO: 34514 - protein, 74 aa, Homo sapiens
LLQWREIITDGGTRRPSFPHRLLSLEASSEDLVGLSFWVWAISVLMCVLFYHYCITVFKPVGTQRTSLCNNNEE

SEQ ID NO: 34515 - protein, 66 aa, Homo sapiens
RYPTLWDRCRKRWLRPIFTQLLAAGLAYHTLLPIPSEPLFAAPGEHLHQCFVKESYCPPRVLAKEQ

SEQ ID NO: 34516 - protein, 28 aa, Homo sapiens
RVFFSLFFQIFCMFKHFHSRKLGGKSVS

SEQ ID NO: 34517 - protein, 86 aa, Homo sapiens
RRLKRCPSRWLCLSAAWSFVQVFSEPDGFTVIFSGLGNNAGGTMHWNDTRPAHFRILKVVLREAVAECLMDSYSLDVHGGRRTAAG

SEQ ID NO: 34518 - protein, 38 aa, Homo sapiens
ISQLVHFVAYSKDPDIGLVARLLSFLVYDFRLCGIRLR

SEQ ID NO: 34519 - protein, 74 aa, Homo sapiens
RSFVPSTCMALTRKWTGAGWLLLCLPVNSFTELGFCIIYYRLSPQICIILLAQNFFPWFIKALPLEMRDSVCLL

SEQ ID NO: 34520 - protein, 75 aa, Homo sapiens
ISFQTSALALALLYSQNWFLRLARVGGRVWEEDRFPPASLGSQEKSLQILRFRVKSQSSFFWSAQNCLCLLPHEE

SEQ ID NO: 34521 - protein, 35 aa, Homo sapiens
TLSMGLCWMRVLLTQVYTSISGQQKRRMTQAWCIK

SEQ ID NO: 34522 - protein, 30 aa, Homo sapiens
MSHVCLKKEWALLLLESNLLIVVITFDCSY

SEQ ID NO: 34523 - protein, 27 aa, Homo sapiens
LQFWASKFWLLHIFPFVPPALEVVAAF

SEQ ID NO: 34524 - protein, 39 aa, Homo sapiens
RRGWPRRRSGLWVFCYRDRLEQKLFILGALWTLVIINQE

SEQ ID NO: 34525 - protein, 40 aa, Homo sapiens
RSCLRCRLKSVKLMSSSLWTTTAVSTWTASLLRSRPSTRI

SEQ ID NO: 34526 - protein, 69 aa, Homo sapiens
LAYILLFLDFFLIKRLLQCLSCDSGMDICPRLSCWGPSMSLQVPSWSPSPALEAWLRASWRRSFGSMLS

SEQ ID NO: 34527 - protein, 34 aa, Homo sapiens
LCLPVSVLNLILSSYLLPVSTSRLPPLPRTNSCS

SEQ ID NO: 34528 - protein, 38 aa, Homo sapiens
INQDSGRQLLRKMLKGKHQGLVLIFESLRVVYFYSVNT

SEQ ID NO: 34529 - protein, 45 aa, Homo sapiens
LYNCFLPPSKLTAREKFSCLIYLKPNGLQWIIHLLGIFLLLFKAK

SEQ ID NO: 34530 - protein, 27 aa, Homo sapiens
IISISQLILLSLSSLFAFSCFFFKKKA

SEQ ID NO: 34531 - protein, 36 aa, Homo sapiens
IKDRLMKLLKKHQCWLLCSRMWGMAYSPSLDIFEIS

SEQ ID NO: 34532 - protein, 47 aa, Homo sapiens
KQRGGRRSKQPLEDQHSRDYGGPSVFSVTGAMLTSVSWTHSDSGAFT

SEQ ID NO: 34533 - protein, 48 aa, Homo sapiens
LAHGRIGLFAEASWWPLLAQEETYILIFLYHGFGSQIAAWYLFSQKIL

SEQ ID NO: 34534 - protein, 17 aa, Homo sapiens
IVLNILAALAAFALEFL

SEQ ID NO: 34535 - protein, 33 aa, Homo sapiens
LKIFTLQKFGSHTAFKAILCTWFPLLLMWLKDG

SEQ ID NO: 34536 - protein, 83 aa, Homo sapiens
IFQDLIMKLSGISWTIITELSSQHCCCIKVQLPVSFPLKHAVVTRRPRSRTAYTALLGPGLWLLHTGELMMTREGPMSWSTQL

SEQ ID NO: 34537 - protein, 38 aa, Homo sapiens
LLPSTNRVTRKIQDFLFFATILTPLLHSFFSVKYVNNN

SEQ ID NO: 34538 - protein, 27 aa, Homo sapiens
LQLISCFLAILSLSSSIPQLSLSRTGL

SEQ ID NO: 34539 - protein, 38 aa, Homo sapiens
LSFSPFPSLGLSFSLAALGWSLRARGDCQRCPLSVTGP

SEQ ID NO: 34540 - protein, 63 aa, Homo sapiens
TRPSSWSLRTSPMRAFIWTCGTWTLWSLSDRSLGSSRICMGFAGSLKRPGRTKARTTFWGTWF

SEQ ID NO: 34541 - protein, 40 aa, Homo sapiens
TAAAPASLSAALQPPAPPRSSLALRRPHRRPRPHQPWRRW

SEQ ID NO: 34542 - protein, 74 aa, Homo sapiens
VVVFIWGFAYLVVRFCESLLILPDVSCGVKSTRPPPLSLRVRGIRGDPVTKDIEEKNKSLAFFFLIACFSPPPN

SEQ ID NO: 34543 - protein, 17 aa, Homo sapiens
MYSVQCLMLWLIFRKLL

SEQ ID NO: 34544 - protein, 48 aa, Homo sapiens
MIKMALGVMAFDGGAAGVHGQSPVPRNQGALTRLLCWTWPRTASSQGW

SEQ ID NO: 34545 - protein, 55 aa, Homo sapiens
VCVFLCWFFKEMGRRKKNSPPLSSISLPPSVLSTGPPSLFCSVLFCFATSPHSCL

SEQ ID NO: 34546 - protein, 31 aa, Homo sapiens
MVCPFCDFCIGLFILSCGIFVLFLSFKLSLG

SEQ ID NO: 34547 - protein, 11 aa, Homo sapiens
IFLLQMVLLFV

SEQ ID NO: 34548 - protein, 43 aa, Homo sapiens
LSRGWLLLVQVLPPTPRISARLCHGGQRPPRVKKKNEPFQSGQ

SEQ ID NO: 34549 - protein, 124 aa, Homo sapiens
MWKHLPVHSSPTPRLTPLWKLQARWLLPQLVYLQGWGSYSLLRPAALISMVLLAREFLYPAKMSVSEVCSSGLSSPLLEQHKTNLIFYASGDICSANGKSGFNQPLPFLKTFCCTHRILSCTYL

SEQ ID NO: 34550 - protein, 55 aa, Homo sapiens
LTTGRMLPFYMVLVWSTSIIMHFSGQLKHFRRCFMLIPAFVEPRKFIYDLGLCSK

SEQ ID NO: 34551 - protein, 19 aa, Homo sapiens
LCSLMLGLLGLQRWAPLLA

SEQ ID NO: 34552 - protein, 15 aa, Homo sapiens
KNKGSCCLFSLWVGL

SEQ ID NO: 34553 - protein, 55 aa, Homo sapiens
LTTGRMLRFYMALVWSTSTTMHFIGQLKHFKMSFMLTPAFVEPRKFIYDLGSCSK

SEQ ID NO: 34554 - protein, 72 aa, Homo sapiens
MSRGRCFSGAITHSPPSASVVWTLSNGSGRSTANPPGSLGLWPRARQSLRRTYATSLRSMTWSSQPRRSSAW

SEQ ID NO: 34555 - protein, 44 aa, Homo sapiens
MGRRKKNSPPLSSISLPPSVLSTGPPSLFCSVLFCFATSPHSCL

SEQ ID NO: 34556 - protein, 91 aa, Homo sapiens
MSSWWKRGLRPSACSCCTAAWPRATSRAVSTTSPENCRHSSRAMAKPMPLLAPVTSATRLQDDMAERGARGTCVEGGPGFGPPGARPEEPS

SEQ ID NO: 34557 - protein, 65 aa, Homo sapiens [sequence omitted]

SEQ ID NO: 34558 - protein, 33 aa, Homo sapiens
ISDTSLSFSPLLLPPAHIASPLPPPSPAGLLAS

SEQ ID NO: 34559 - protein, 32 aa, Homo sapiens
IGGEHSFSLLFGMLCCLVVTVPMGELYRKIVM

SEQ ID NO: 34560 - protein, 33 aa, Homo sapiens
LVVLVLFLLAEWRLVFSNPVWWSPLLQSTLQRK

SEQ ID NO: 34561 - protein, 30 aa, Homo sapiens
VGIDTPSSLAVVSAFLLTAWLPPPLLLGSW

SEQ ID NO: 34562 - protein, 81 aa, Homo sapiens [sequence omitted]

SEQ ID NO: 34563 - protein, 50 aa, Homo sapiens
RRSCRRGVSSSGMGSTKPAMLLAWVWTGAPQRKPRPTSWPSCTRRWTRQR

SEQ ID NO: 34564 - protein, 9 aa, Homo sapiens
VASVLLLWW

SEQ ID NO: 34565 - protein, 23 aa, Homo sapiens
TRARSYVSAAAAAASVAAATSSP

SEQ ID NO: 34566 - protein, 8 aa, Homo sapiens
MHLHAFVS

SEQ ID NO: 34567 - protein, 8 aa, Homo sapiens
TLSWVTPR

SEQ ID NO: 34568 - protein, 43 aa, Homo sapiens
LQATTSFTWVRFVQFFVQNPKNLDNLHSRPSTGLASQRPSSFR

SEQ ID NO: 34569 - protein, 74 aa, Homo sapiens
LNLRRFLRGAAWMLLSPTRCISCCHQESSLASQGLRKYHQSDSTVLCPLRGRRKRMPCRTAHSVPLCSRTPSIM

SEQ ID NO: 34570 - protein, 39 aa, Homo sapiens
TRRLGSPHHLLLPSRRRSRSFSRIIPSFAGPLVSMALAH

SEQ ID NO: 34571 - protein, 16 aa, Homo sapiens
RTQIPALLLLVLHGHL

SEQ ID NO: 34572 - protein, 67 aa, Homo sapiens
LAKMSFTYIWWTQQGRMSTAFCPIHSSLGSMVMCLCILSPLCIASKSLRVCTKSYMKAMGKPGCQWF

SEQ ID NO: 34573 - protein, 22 aa, Homo sapiens
IFLFVCIFFPLLVEVRFPPTRP

SEQ ID NO: 34574 - protein, 17 aa, Homo sapiens
IRRLQVRVLPRSKGGYD

SEQ ID NO: 34575 - protein, 41 aa, Homo sapiens
MSARPRSPAAQSSTRPSSAIVTCFSVPGLGPVLTSQQTCTE

SEQ ID NO: 34576 - protein, 16 aa, Homo sapiens
ILCTWFPLLLMWLKDG

SEQ ID NO: 34577 - protein, 17 aa, Homo sapiens
ICLLMFLLWLCLFSVLL

SEQ ID NO: 34578 - protein, 74 aa, Homo sapiens
TMGPSWMWMRMTLRRLMLPPATVWRIWPHWCTSMSPASCTPCASAMALACCTRMLAPACWFLAPVGPLLCTLRR

SEQ ID NO: 34579 - protein, 8 aa, Homo sapiens
LLFILCVI

SEQ ID NO: 34580 - protein, 46 aa, Homo sapiens
RSKPSIMRATMIWRNRSSRRPWRRLLWPSVAQCPSSSWVKWTAAPS

SEQ ID NO: 34581 - protein, 62 aa, Homo sapiens
LCSTPRMHRLWIGPAFFLMTSLSVSGAVIPRNGGPGGVSSGPCLLQLLCGQAGSSTIRKIPS

SEQ ID NO: 34582 - protein, 27 aa, Homo sapiens
LKLFLSLQNLILALDLRRESLTRDETQ

SEQ ID NO: 34583 - protein, 29 aa, Homo sapiens
ILIWLLGCYLEIQALKMPASLDLEDDLDK

SEQ ID NO: 34584 - protein, 122 aa, Homo sapiens
MGGPLVSRDKKCFFRNASFLSKMKVLDSISFHLKISSVYLMASVVSFLKLLLTYWELKKGSVKASRGACPSQGGASLLSPAARALVLHQLQPQCPDTGGGKGSARTSRSTHRSCLVPICKIS

SEQ ID NO: 34585 - protein, 19 aa, Homo sapiens
MITKVVFPEQGLAVLLWMC

SEQ ID NO: 34586 - protein, 72 aa, Homo sapiens
MAQSGGAAFWGSALGLQTQGAEMLAAGPPTRARQPALPGELRGAEVPGEAAPGARALPDLGNRQSGAPGSKS

SEQ ID NO: 34587 - protein, 25 aa, Homo sapiens
MRLPGGRVPPTIVGTVSPRFPLTCR

SEQ ID NO: 34588 - protein, 38 aa, Homo sapiens
MFHVGSSFRALLFTSKKVPLRTGCQFVLLCWLLMKIIK

SEQ ID NO: 34589 - protein, 122 aa, Homo sapiens
MCYLLLLLIQTAELLIHPQGLQAVSNGESALKGTRPTFSSPFILVTEGRKEWEGVFLSSGWKGNTLSNYYISLVFYYSRILQPYFYCLWGKLEMVTLIRSVWRGINGGDKIQLVLENVKVLK

SEQ ID NO: 34590 - protein, 47 aa, Homo sapiens
MAPNCPCLWHPLSLVPSIPTTACQSKPVPASRMVPAPAPRPPPPQVP

SEQ ID NO: 34591 - protein, 47 aa, Homo sapiens
MLSRGWLLLVQVLPPTPRISARLCHGGQRPPRWLTFSPTICFLLLKG

SEQ ID NO: 34592 - protein, 47 aa, Homo sapiens
MLPPGTDHSSCLVLSQVSSSLGCLKNEKPKRQGPGMPNIHSISGESG

SEQ ID NO: 34593 - protein, 32 aa, Homo sapiens
MQSHEECAEGRGYFSRWSCQIGTLWRVWPENF

SEQ ID NO: 34594 - protein, 41 aa, Homo sapiens
LNSPASLLAIFSHSIAFAVFYLDQYLISFSFSSLLWGSRSG

SEQ ID NO: 34595 - protein, 50 aa, Homo sapiens
MGWWLRQMMMKIGDDWPLVALGLPSPSGHGGRRELNLGPGYLPPVFPTSS

SEQ ID NO: 34596 - protein, 54 aa, Homo sapiens
MDPQRRFLVASLVAGVCIETLRGKAPRLGLGAWRRRLPPRSSSPGPEAPRLQSC

SEQ ID NO: 34597 - protein, 20 aa, Homo sapiens
VLRSAVLGSCVDSGLETLPA

SEQ ID NO: 34598 - protein, 41 aa, Homo sapiens
MPAPSALKGTSLILLLTGLRPQLVATTTYQAISRVGLRTQS

SEQ ID NO: 34599 - protein, 79 aa, Homo sapiens
MKGLGQAGPSCLRSLLVAVACSSSLVVQIPRLTKRRNSFYLHPGPIIADPDVCRGENKRSKNRPCCEGPRGSARMKELE

SEQ ID NO: 34600 - protein, 45 aa, Homo sapiens
MKGLGQAGPSCLRSLLVAVACSSSLGKIKEAKTGPAVRDHEAVPG

SEQ ID NO: 34601 - protein, 41 aa, Homo sapiens
LCQLSSIQISFLCLMLLPYPIPGPSSAFWKFPFAQEVVSSS

SEQ ID NO: 34602 - protein, 602 aa, Homo sapiens
VSPPAESVCGLGENVSDILGRSRGRAGSERPRDSPSLEPCPPRSPPVRRAPDIATLHPRDCPTPGPRGSAASLPPPTPAATAQFPQPDPVCRSQSLQAASGTFGGPVGRPGRAGTEPPRLGQWAWAGAVAEDLARPLQTPGDSHTAAAMATNKERLFAAGALGPGSGYPGAGFPFAFPGALRGSPPFEMLSPSFRGLGQPDLPKEMASLSVETQSTSSEEMVPSSPSPPPPPRVYKPCFVCNDKSSGYHYGVSSCEGCKGFFRRSIQKNMVYTCHRDKNCIINKVTRNRCQYCRLQKCFEVGMSKEAVRNDRNKKKKEVKEEGSPDSYELSPQLEELITKVSKAHQETFPSLCQLGKYTTNSSADHRVQLDLGLWDKFSELATKCIIKIVEFAKRLPGFTGLSIADQITLLKAACLDILMLRICTRYTPEQDTMTFSDGLTLNRTQMHNAGFGPLTDLVFAFAGQLLPLEMDDTETGLLSAICLICGDRMDLEEPEKVDKLQEPLLEALRLYARRRRPSQPYMFPRMLMKITDLRGISTKGAERAITLKMEIPGPMPPLIREMLENPEMFEDDSSQPGPHPNASSEDEVPGGQGKGGLKSPA

SEQ ID NO: 34603 - protein, 11 aa, Homo sapiens
LGNNNLVVFLL

SEQ ID NO: 34604 - protein, 108 aa, Homo sapiens
VGGLRLLLGAVHLTVPAIGESPVLVAFDGDEGVVTRLRVPADPGHHRHVQVLNAECSCAASAQTMATEQRLAQPDLLHPSSGEQMDRSAETPSGHLPPLCGEKVVFDG

SEQ ID NO: 34605 - protein, 38 aa, Homo sapiens
LISIKGLGMHYVIVLSLFVVLEKKNKMGSDGCLRKNGS

SEQ ID NO: 34606 - protein, 44 aa, Homo sapiens
VLIQLSSFHELTLIYDCVSDLRCMLPVIAVALVSDSFAIAKYPL

SEQ ID NO: 34607 - protein, 54 aa, Homo sapiens
LSPILTRLFALPSPPTQGLPSSPPCNTAPRTMSVYLETARPIPFWVSSVPFSHR

SEQ ID NO: 34608 - protein, 27 aa, Homo sapiens
MKQSTSFSSIVLTSLPFIQLDRHSHSL

SEQ ID NO: 34609 - protein, 56 aa, Homo sapiens
VILNKSHKIWWVYQGFLLLLLPQFLLLPPCKKDLLPPTMILSPPQPRGTISGGFFK

SEQ ID NO: 34610 - protein, 72 aa, Homo sapiens
LTINLDSGCSNFKFFSSFSLQAFIWSLFESEDPENLDPLLALIPLGSVIWIEQMLRLPLHHILETALLYSKS

SEQ ID NO: 34611 - protein, 37 aa, Homo sapiens
LALSPRGTAGSRGDECSRNLRSLCAYFRDRHHVTVTS

SEQ ID NO: 34612 - protein, 19 aa, Homo sapiens
VNFLGAMMYCNFILMYFDL

SEQ ID NO: 34613 - protein, 10 aa, Homo sapiens
LKMLMSALVF

SEQ ID NO: 34614 - protein, 48 aa, Homo sapiens
MVKNFLNMFYMFLIYLPLKEGWPEELKEPLILQDRPKHVILLYHMRFI

SEQ ID NO: 34615 - protein, 44 aa, Homo sapiens
MYTRTRTRAPVSRAVSLADTQALTSLSLPACRAATPKTQLRVPT

SEQ ID NO: 34616 - protein, 38 aa, Homo sapiens
LAVAMDTLCVAAMGAVLQQSQGISLLRVLCFIMKNNGR

SEQ ID NO: 34617 - protein, 18 aa, Homo sapiens
MTVVSVASLAGLLFLRFS

SEQ ID NO: 34618 - protein, 55 aa, Homo sapiens
MCLALQQFLLAASAGLLSLCVAPGVKMTPAVCTRQGYQVRNWLILTERFAPFSLE

SEQ ID NO: 34619 - protein, 16 aa, Homo sapiens
MPPYRNMSRRINHLPL

SEQ ID NO: 34620 - protein, 55 aa, Homo sapiens [sequence omitted]

SEQ ID NO: 34621 - protein, 71 aa, Homo sapiens
LGNLSCSFLFNFFYLSLTRAYSHWICRRSVGDRGCEGLCHPSSRIWGERAPSLLSLPPFRTPRRDSFWDSH

SEQ ID NO: 34622 - protein, 61 aa, Homo sapiens
VPERAGLAAATAAAQAAGASLPRAALPALLPGRAAGMGRPREPERAQEPPPPPPASPLPRA

SEQ ID NO: 34623 - protein, 40 aa, Homo sapiens
MYLQLLPILTTESLSVVLLGRQLNQFWFIPLFLLLLLGCS

SEQ ID NO: 34624 - protein, 38 aa, Homo sapiens
LVESNTLTAIKMFAWKLVSLMTNICISDEYVCLKMLSF

SEQ ID NO: 34625 - protein, 32 aa, Homo sapiens
LGSIAYERAEFHASVRTLGWAFLPPGTLKLQE

SEQ ID NO: 34626 - protein, 115 aa, Homo sapiens
LEKMTFEQRHEESGEYLEKSISGRGKCQGRGPEVLLTAIVCCGGRLPENGAIQEEMGQRNKEKSNPIFSVPLPSLPHPFFLADYSVVLFKIYSVFVFHLRRFSLFVFLLFATSVF

SEQ ID NO: 34627 - protein, 459 aa, Homo sapiens
VDLQITLRNFNHWRQEMLFHRAKHDVAHMIVGHHPGQNMGQAFLSGACSSGFAAAVESFHHEDVLLFAALMAHELGHNLGIQHDHSACFCKDKHFCLMHENITKESGFSSCSSDYFYQFLREHKGACLFNKPRPRGRKRRDSACGNGVVEDTEQCDCGSLCQHHACCDENCILKAKAECSDGPCCHKCKFHRKGYPCCPSSRSCDLPEFCNGTSALCPNNRHKQDGSKCHTIYECLKVHCMDPNNQCLQLYGYGAKSASQECYNSMNSKGDQFGNCGISTSPGSQYVRCSDGNIFCGKLICSGITGLPKINLQHTMIQVPQGDGSCWSMDAYMSTDIPDEGDVHNGTYCAPNKVCLNSACTDKTPVISACNPEKTCNGKGVCNDLGHCHCNEGHAPPDCVTAGSGGSVDSGPPGKLGGTPSGEGENHNMTHSRREEHAVDMMILSFIILFIILLLSTII

SEQ ID NO: 34628 - protein, 31 aa, Homo sapiens
MPTSPHTLLISLSLPLSPRHVGHCCQRLPPP

SEQ ID NO: 34629 - protein, 50 aa, Homo sapiens
MPILAYFVCHRHRQRELGHACYGDPLVGHLIGCLFMRGLLFFTFYAALLP

SEQ ID NO: 34630 - protein, 61 aa, Homo sapiens
VDRRAGAAALVAVAEVAAASAAAAAATASGSGFWRRRRRARLRGADPGARSGLLGRRVRCL

SEQ ID NO: 34631 - protein, 76 aa, Homo sapiens
VDRRAGAAALVAVAEVAAASAAAAAATASGSGFWRRRRRARLRGADPGARSGLLGRRVWRQLCHPRLPGPQSQLWG

SEQ ID NO: 34632 - protein, 60 aa, Homo sapiens
LVAVAEVAAASAAAAAATASGSGFWRRRRRARLRGADPGARSGLLGRRVDGVLLHCPGWS

SEQ ID NO: 34633 - protein, 36 aa, Homo sapiens
MNVLLLALPLTHRVPQASPFTSSVSVSPFILLRQWT

SEQ ID NO: 34634 - protein, 24 aa, Homo sapiens
LLNSCRPEIGAFQAPQMSHKPPRL

SEQ ID NO: 34635 - protein, 24 aa, Homo sapiens
LSPGALRILTVLIITAIIQHMMLE

SEQ ID NO: 34636 - protein, 23 aa, Homo sapiens
VAAQLQVLARPGLALWMMMALPP

SEQ ID NO: 34637 - protein, 118 aa, Homo sapiens
MGTRAAWFLALPFTPLPSRRCYWWPTRVHWGVMPAAEGSHLCSLEASLGYWKAPCPGDKCLGSYSLLSGPLIQEPVTGGVGTLWYCGLCLELSVGPAEAGRPLKPLPCPAAPSPPLLP

SEQ ID NO: 34638 - protein, 18 aa, Homo sapiens
RWWDLTVGPISLFSALLA

SEQ ID NO: 34639 - protein, 69 aa, Homo sapiens
MGQDGIVKWLFTVNCNTILFMDLFAYFSLHRETFLPWLRTHSWIEPTGELSGKHLANFFFFEMESCCVA

SEQ ID NO: 34640 - protein, 87 aa, Homo sapiens
MATLAPILWAPGFAHQISSPLALHLLLYLQGLPDSHLPIIMDTAPGCAGLSGTIWSSSWNLGLVEWEWGRGLHWADLESTVIPSIWK

SEQ ID NO: 34641 - protein, 28 aa, Homo sapiens
IECYSTLDLSLIFWSLASCIFLEPQLNS

SEQ ID NO: 34642 - protein, 45 aa, Homo sapiens
LFLPSLRLQCLMGLPVGGSVFAVPGRSGEPWEEVLRRPSLGSPQD

SEQ ID NO: 34643 - protein, 36 aa, Homo sapiens
MLNMETAQFSWRTVHLMSLDILSMIIQYLLMGSLFS

SEQ ID NO: 34644 - protein, 35 aa, Homo sapiens
IPMWCIIQKENSWHVTISTTCTLSLSLMSLKSRSW

SEQ ID NO: 34645 - protein, 18 aa, Homo sapiens
ILAPQVWDFWVFSWLASC

SEQ ID NO: 34646 - protein, 103 aa, Homo sapiens
KRFSCSHCWQMIEPGFESRQPGSRPCALNSRFASRTESYERLAQCLVLSRHSDSSIKEHCVHAEVHSTWSETACVRFLIPFITGCVISNKKTEEPAGRGSSRL

SEQ ID NO: 34647 - protein, 40 aa, Homo sapiens
LIFFSWCVWWLFLSVEGKRRYHPRLSPTPLQNGFSDTPAV

SEQ ID NO: 34648 - protein, 40 aa, Homo sapiens
IMWVTVMMSNAFAVMVDSGVGNLEMIHGFNMPSGFQGVST

SEQ ID NO: 34649 - protein, 52 aa, Homo sapiens
IGLLSGGRPTARSFFSALVRFLFGFLPASGATRVARQQPLGDLVLGSCPAWG

SEQ ID NO: 34650 - protein, 11 aa, Homo sapiens
LCCVWVCVFLF

SEQ ID NO: 34651 - protein, 25 aa, Homo sapiens
VAIRLVLKFLMLCLVTHTVPRDSAL

SEQ ID NO: 34652 - protein, 93 aa, Homo sapiens
MDPALRSPTPPGSLSTALPGLAPSSGLGEQGLGVVQPSQQEGLRPSRRKAQREGALIPSDPVFPHPPYPAGLGLRQGWPQFLLNRPGGSPSPA

SEQ ID NO: 34653 - protein, 25 aa, Homo sapiens
LFLNASQALLLGLLLLINPNICTKN

SEQ ID NO: 34654 - protein, 35 aa, Homo sapiens
MFSCTIRLFTRKGKLFLFGISIQDILSLCKDRSRS

SEQ ID NO: 34655 - protein, 128 aa, Homo sapiens
IAALYEMPVPACWISSSLSLLASHHSVSCSNIFLNFNPDHIRVQAQVYFTQESSILSSTLWNFCLLPQQRFCGREYVQAGWPCWLLQFFSQTYMHPMKTAGKPWLLRYPSLLEQQILSTYQMTPQSPS

SEQ ID NO: 34656 - protein, 40 aa, Homo sapiens
LRNLLKIISFVLLLLMLLLLYLTWVFYNVVFNFNCQSLNM

SEQ ID NO: 34657 - protein, 117 aa, Homo sapiens
IQPRMLQRSLFLLLLKTTGDHFGNLKKLWSLPYMTTKPMILRNSHCGATKSTACWTVLRFTGGESRTGMGMKDMYQAVIWWKNLQIIWKPMSGTIRVSAETKLKNFFWTQAKKEPSW

SEQ ID NO: 34658 - protein, 126 aa, Homo sapiens
LAPGLGFGRVKMCWPDGLMGCYTWVPSKRWTVLGRCVWSSLRMIRSFWFYGKTLALLPSLERNSSVVSVALRLWSLGTGWSAVRSVAMLITRTAMFPGLQPLERERAHPGYAASVSLRSPPRGEVP

SEQ ID NO: 34659 - protein, 89 aa, Homo sapiens
IVDIDHDQDLVPTAQDAIDNGMVAIKDIFFPLFFFFFFNSEISPSCGFFLLLKKKTLVYLASTLLSVVLLFSTHFIILLKDVIVVILNS

SEQ ID NO: 34660 - protein, 16 aa, Homo sapiens
IARLVNLSRLNMLWLL

SEQ ID NO: 34661 - protein, 13 aa, Homo sapiens
LVNLSRLNMLWLL

SEQ ID NO: 34662 - protein, 15 aa, Homo sapiens
MKTSISWWLCMTTPL

SEQ ID NO: 34663 - protein, 71 aa, Homo sapiens
LSFLALLCSVRAALELCSPGRSPSTSSAAEEPSASAPAPLSSAAPIPGSSLRGVELFPMTVLIRLHYTFVC

SEQ ID NO: 34664 - protein, 14 aa, Homo sapiens
LGTLFITMTNLCVL

SEQ ID NO: 34665 - protein, 39 aa, Homo sapiens
LSPEPPCCRRLLPLLAVSPSVPALCAPPSGPWMVLLQIL

SEQ ID NO: 34666 - protein, 20 aa, Homo sapiens
LSIFSWVEPVTWFLFVLLEK

SEQ ID NO: 34667 - protein, 95 aa, Homo sapiens
VGLLSTLLCLKLQRFCPDVSWNNAEDCLSGSRPIQFTSSRKYLTPALDPAALLRAEEGGNPMCLLPELPQPIFPQLGTWKKEPRTRLCFSFGPSW

SEQ ID NO: 34668 - protein, 28 aa, Homo sapiens
MFLSAGPIVPLLRNVSPVQGQRLKRLLY

SEQ ID NO: 34669 - protein, 30 aa, Homo sapiens
VLMFLSAGPIVPLLRNVSPVQGQRLKRLLY

SEQ ID NO: 34670 - protein, 42 aa, Homo sapiens
MQTRGAGIPSPGWSAIWNLTRWKQHRGGFGPGVGAWRDRGCH

SEQ ID NO: 34671 - protein, 13 aa, Homo sapiens
LRIMCVGVSWTLL

SEQ ID NO: 34672 - protein, 95 aa, Homo sapiens
LLRSSLGVAVGRGSDPGPAVVPSSLPPFLRIASFLLTTASTVRSPAEPGPGGESCLHGRAPRPHRRSRHHLSPSLVPAMGFVSSSALVTDLDTEY

SEQ ID NO: 34673 - protein, 33 aa, Homo sapiens
MPLLRGLLWLQVLCAGPLHTEAVVLLKQKVWCK

SEQ ID NO: 34674 - protein, 64 aa, Homo sapiens
LQLAVWNVAQEALIFLAGTVAAVLACGPGQPLPSRRAGEDWCMLGFVVRPHEARPGNIMGRNGA

SEQ ID NO: 34675 - protein, 14 aa, Homo sapiens
MENHFDPWFSLPGD

SEQ ID NO: 34676 - protein, 113 aa, Homo sapiens
RFSRPQLMPRLSLVVLLLSILDGAPGHHFRLSEYCKKQAQTSPKQSCHTWIGLFLIRKSSWSLLNLAATWNMISLVLNYFITNSAQILTCLMITKELEGCVSWWKRAVKIEFW

SEQ ID NO: 34677 - protein, 39 aa, Homo sapiens
ILLIYFLIMLISNEDSCLKIFFNLMVSIFCKNHVNLFHS

SEQ ID NO: 34678 - protein, 52 aa, Homo sapiens
LIFFSWCVWWLFLSVEGKRRYHPRLSPTPLQNGFSDTPGSEGVGSPGCARSK

SEQ ID NO: 34679 - protein, 80 aa, Homo sapiens
RASGDRQGEMTELDETRGRAGGARRKLGKETRSRGTTVGQAAWKISAGSPRQNSHAPGQAVPTAWWRGNLTSGRAPLLHS

SEQ ID NO: 34680 - protein, 14 aa, Homo sapiens
MGMFCISCLVLNFL

SEQ ID NO: 34681 - protein, 26 aa, Homo sapiens
IMVGEESRRHQAGVCSAPSAAAHRRR

SEQ ID NO: 34682 - protein, 72 aa, Homo sapiens
LEVLRAYKKARRHPPLCSGAALPAGCRHSGQCLLHLLGTSGAAAPAPGSERRVPEIPASLRPTVVRGESCKC

SEQ ID NO: 34683 - protein, 41 aa, Homo sapiens
KCCCLVEIQYYIMTCYYASLPNSSSGDAILKSAILRVFTHC

SEQ ID NO: 34684 - protein, 9 aa, Homo sapiens
MWPYRQPSL

SEQ ID NO: 34685 - protein, 18 aa, Homo sapiens
MPRTQIPALLLLVLHGHL

SEQ ID NO: 34686 - protein, 24 aa, Homo sapiens
KNDVMRWLLQSIFCCGMVIPVISL

SEQ ID NO: 34687 - protein, 28 aa, Homo sapiens
MRKLRLEGEKQLPLAAWLLAAGCPWSSW

SEQ ID NO: 34688 - protein, 52 aa, Homo sapiens
RMSTAFCPIHSSLGSMVMCLCILSPLCIASKSLRVCTKSYMKAMGKPGCQWF

SEQ ID NO: 34689 - protein, 22 aa, Homo sapiens
LTAGTSLHHPVPFFPLVKMEIC

SEQ ID NO: 34690 - protein, 100 aa, Homo sapiens
VGSRAQTGAILPEAASRSWGRPGGRLKLFFCLFCSLGLGEDLEVWAPSSPLETAMVSSNHHHLTTLHGGCPLRAASAAALSSPLYLSAPEPQSSFRPRDR

SEQ ID NO: 34691 - protein, 16 aa, Homo sapiens
LILTITTVFLAIVCSD

SEQ ID NO: 34692 - protein, 21 aa, Homo sapiens
MVMMMMIMTLMIFNRIKIEFF

SEQ ID NO: 34693 - protein, 127 aa, Homo sapiens
IVRAYMKFVMISLHMSRIDILSKKLWKSLGTMVQGCSVGFWKSSLHHIKMVLLMDMLTVWMEKLLSSVIVMIQKHKAVLFKMGRKKMQLIPYYSSIKCNPLKKNYMSLLLLKQHKSAGENTYFLVIN

SEQ ID NO: 34694 - protein, 51 aa, Homo sapiens
LRLHTPTAVASPVPRPRGRRPKSGGNSLSHKAMGKRDPVETRVLLCFPGWF

SEQ ID NO: 34695 - protein, 25 aa, Homo sapiens
KKVASRSSSLFVRLGSIRPRRPTLR

SEQ ID NO: 34696 - protein, 6 aa, Homo sapiens
MPETME

SEQ ID NO: 34697 - protein, 32 aa, Homo sapiens
IAPPALGFWPRRWRLWLAVTLAFQARPGEATR

SEQ ID NO: 34698 - protein, 24 aa, Homo sapiens
VAASLSLSLFWGLIFAVLIPGLTR

SEQ ID NO: 34699 - protein, 64 aa, Homo sapiens
ISLLARGNHRLFSRILFFSHLLAFFFLPPWLPSPNPAIPSSTPVLPSPAILSHPTCNLLSFAPP

SEQ ID NO: 34700 - protein, 49 aa, Homo sapiens
LGRRRLYSACRPTDYPSRIYAPRILRSSALSLSSLAGAPTGGLIGYIAA

SEQ ID NO: 34701 - protein, 108 aa, Homo sapiens
LTGCVTLGPELPLSGPQRPYEGPLLQEHPHDIAFGGAPVACRIACGLCNLLRFKTDGHMCQWGSLSPGPKKQGTKFKTLASSQPLKPWPPEFPFLSLSFYFFYFYFYF

SEQ ID NO: 34702 - protein, 61 aa, Homo sapiens
KPFLLPPLPPLLLISAGTEVSSLVFQKSPLHTQPEGAIKTVGQPTSVHSKVLSKGSLLLGE

SEQ ID NO: 34703 - protein, 6 aa, Homo sapiens
MLAESS

SEQ ID NO: 34704 - protein, 114 aa, Homo sapiens
MAAPRATMASTVARNATVPTGAGATASTGPASATQGSTAASATSPARRGPLGRAARRSASVCSPTRSPVTRGMAAAPARLASGASAVRQSVSWATLGRGAGRHAPAQWAWPVTP

SEQ ID NO: 34705 - protein, 102 aa, Homo sapiens [sequence omitted]

SEQ ID NO: 34706 - protein, 142 aa, Homo sapiens
MPGMATLMADSMCDDSYSSCGRQSISSSRSLPSSSCSLSHATVLLIAISDAKGTGLSVSIMGVELRERAGCLPDAPRGRHRPSAPRAKLPLSERGLIPPRLTQAEASGWGRRDRSKAGGSLCTQLQPLALSVNESLSMKLPR

SEQ ID NO: 34707 - protein, 56 aa, Homo sapiens
MLKEKRSKSHSSGGSVATPRCPLGTNPKATSACLVGNVNCYPESRPSLSLVQDRKY

SEQ ID NO: 34708 - protein, 52 aa, Homo sapiens
MRGPWSPQPGTLVLFSALAPPKQSPSMRWAQPSPTSCWPSWTSTTSASGCRS

SEQ ID NO: 34709 - protein, 36 aa, Homo sapiens
ITTAMKITMMITMVMIITTIVEAMKIPTTAMMMAMQ

SEQ ID NO: 34710 - protein, 38 aa, Homo sapiens
VFENRASATCMMWIGEMVCPPSHGMSLLCSGIFPSLGF

SEQ ID NO: 34711 - protein, 16 aa, Homo sapiens
MIMEMVYLMLKMSLVF

SEQ ID NO: 34712 - protein, 42 aa, Homo sapiens
RHFQMNLPEGLMEISSVTKFRRLKIHKVFMGLFLALIQVCMK

SEQ ID NO: 34713 - protein, 46 aa, Homo sapiens
MVPVNVLLPSCGCSTACSTTASQPSSGPCSGIDSISENSTQMLPSC

SEQ ID NO: 34714 - protein, 47 aa, Homo sapiens
VAVALVAAAAAAAAALERFLSGSAGGPPGWSTCKSRSGAPGIDGDEL

SEQ ID NO: 34715 - protein, 57 aa, Homo sapiens
VAQEALIFLAGTVAAVLACGPGQPLPSRRAGEDWCMLGFVVRPHEARPGNIMGRNGA

SEQ ID NO: 34716 - protein, 15 aa, Homo sapiens
KRFQIRAEMGRRGGS

SEQ ID NO: 34717 - protein, 50 aa, Homo sapiens
MVRRDTQRLRQYNAPNHPPRPDAPPTHGKESHLVRDYSHFRGGVLLFFLP

SEQ ID NO: 34718 - protein, 28 aa, Homo sapiens
MPCEDGSETEVMRLQAKECEEWPATTGS

SEQ ID NO: 34719 - protein, 56 aa, Homo sapiens
MGRGSSTGRLPGERNGDGGAARRARARARPALGLPAAPLRRSPAPLLLAPENPSPA

SEQ ID NO: 34720 - protein, 83 aa, Homo sapiens
MRARLRVVWGGTPSLRVRPGGSHVKGTRLEGAPAGGAEAPSLRVRLGGLRGEGTGLERAPGEDGGGPDCEGVSWGTCLGGTGR

SEQ ID NO: 34721 - protein, 26 aa, Homo sapiens
MWDDRIRRTRHLGGLVPSSMSLGSLS

SEQ ID NO: 34722 - protein, 31 aa, Homo sapiens
MKGSPYRLQTCQLVKEANRTVCYKLQSMYLC

SEQ ID NO: 34723 - protein, 89 aa, Homo sapiens
MWTQRNTRDAHTQRTDHGKAQQECGRLQAKERSLKRNQPALDLGPPPSRTLPASPRLLVRTQPQRGRRAEAGSPFGLCIVFHRFNMKQK

SEQ ID NO: 34724 - protein, 39 aa, Homo sapiens
MQRWRPPVIPALREAETGGSLETSQDNMAKPHLYNKYKN

SEQ ID NO: 34725 - protein, 42 aa, Homo sapiens
MPSWNFPPSNPSFVFPWLFDNNGWSPEPDPLYRTVFVISSAL

SEQ ID NO: 34726 - protein, 45 aa, Homo sapiens
MLGLEDASDIRCRPGQATSSRLPHRDVLWSHGPVLFCRLVLSFVK

SEQ ID NO: 34727 - protein, 134 aa, Homo sapiens [sequence omitted]

SEQ ID NO: 34728 - protein, 51 aa, Homo sapiens
MKDIAVSFTTGSMERKRSLQRLNKQHALWYPLFKNCELTTVVVFSFTILMA

SEQ ID NO: 34729 - protein, 32 aa, Homo sapiens
MVYAIFLHLELTWRHVWPNCFSFISGNNQTRD

SEQ ID NO: 34730 - protein, 26 aa, Homo sapiens
MLQDTESERMHPVLPSGFTTKASLHL

SEQ ID NO: 34731 - protein, 51 aa, Homo sapiens
MNGKREENMWIRPGKRAAQPSHSQDEMQGEFWKLRVSCCWVVWKDRLELGS

SEQ ID NO: 34732 - protein, 29 aa, Homo sapiens
MPVKCHLNSTVPGVRQARGTQFCLSSGFS

SEQ ID NO: 34733 - protein, 28 aa, Homo sapiens
MGLESGLNHSSIMPPWQGWQRGRIMLRK

SEQ ID NO: 34734 - protein, 34 aa, Homo sapiens
MPSWAVFTPPRCHNRLALPCLSVYSAFPAGRRVW

SEQ ID NO: 34735 - protein, 24 aa, Homo sapiens
MFYHQKHFQLGLKGTETEKNERRL

SEQ ID NO: 34736 - protein, 103 aa, Homo sapiens
MSLEFAPRHPSGARLLCDPSPHFLVGLLDPRTYLQQQLDPLDGRYRRLGDGCGHSTCQEVLGEGHSGICHVERGGRLLQDGTGPGTGFDSGAAGRSEANGRFI

SEQ ID NO: 34737 - protein, 45 aa, Homo sapiens
KEVPSGTPFMAILMLHLLHFSEGPTPLKFSLEDEWVVVEILKKWK

SEQ ID NO: 34738 - protein, 26 aa, Homo sapiens
LCYLSLYALQNLFTLLFWKRIPEAKP

SEQ ID NO: 34739 - protein, 51 aa, Homo sapiens
IAASGFLFSTNRIWSLVLHLLSVARIPPSPLASPLLGSSPVGIHVSSLTPP

SEQ ID NO: 34740 - protein, 13 aa, Homo sapiens
LASQSAETTEREC

SEQ ID NO: 34741 - protein, 84 aa, Homo sapiens
IAAFRKCIRPTMEPTLMLLAGLLIMYRDSCIVVEFTTTQTGKIQIGSKKPKTRVSLLAAAERLPAIVMAAWPTLPTSMLRGVRL

SEQ ID NO: 34742 - protein, 41 aa, Homo sapiens
RRRSAVGSVSARGCGGAGGSSLSGFSLGGGGGGSVDASSAS

SEQ ID NO: 34743 - protein, 29 aa, Homo sapiens
ITDLLVTPLLAAHAAGTGAAEKGAPSSGK

SEQ ID NO: 34744 - protein, 35 aa, Homo sapiens
VFWLEYSAIGEDGRFVETTLPRTTFHHQICKKNHK

SEQ ID NO: 34745 - protein, 155 aa, Homo sapiens
LLSLLSEKFVRCQPSSQLGTEQETSPASLAGVAAGVSVACAGQDARPTGLPLRGPHQPPHSRSPGRRERRGWTSGKAWRAASGKPSGLLPPPSTGESQATVNEEQRAGETSASAQEQRPATPPTGDPVDALVATLPGSPSPSEPERISVPLLLGA

SEQ ID NO: 34746 - protein, 152 aa, Homo sapiens
MDSHPTAGAWERSPICCFPGALTSWPSAPPARNVPHMQSHVGLARKKKGAPCILHSRGPQEGMGAPGCRDSTFPHQLPKNAQPPRADTAPTPAGTGLQPHSLRYVLQSRLIHPTLGRRETEAWQETRLTQRGLSRHQHRQALCRTPGSSGRK

SEQ ID NO: 34747 - protein, 30 aa, Homo sapiens
LLWASTGAAAMALSSSAGVHPASWVPELPV

SEQ ID NO: 34748 - protein, 39 aa, Homo sapiens
LVPALGLRDCGLSPSGAAAMALSSSAGVHPASWVPELPV

SEQ ID NO: 34749 - protein, 32 aa, Homo sapiens
KNMTTEMNILILFSHISGSFVYSMVQHLFTLQ

SEQ ID NO: 34750 - protein, 24 aa, Homo sapiens
MASVSLLCFTASFLLREVPACAGM

SEQ ID NO: 34751 - protein, 12 aa, Homo sapiens
VFWKYLLCLRGL

SEQ ID NO: 34752 - protein, 39 aa, Homo sapiens
MTFLLTCPGTLFPEISPCSGKIATSLLTALQTTPVVLCP

SEQ ID NO: 34753 - protein, 50 aa, Homo sapiens
MKGMKSFETCLCLAMWDLTASLTSWSTSLLLKDSVSTSFVLVRQALANPR

SEQ ID NO: 34754 - protein, 56 aa, Homo sapiens
MFLLKYQPSAAREAAVSAAVAAAASLPTVLLGDLHIMLRNSFQSTSTQDQLPMSTC

SEQ ID NO: 34755 - protein, 28 aa, Homo sapiens
LVPLTFFFLTDFLIPQSHRHANVQEVQM

SEQ ID NO: 34756 - protein, 30 aa, Homo sapiens
MASFSSSNPLVNLFLFSTRSRSLLISKRRL

SEQ ID NO: 34757 - protein, 63 aa, Homo sapiens
IFPTTTISVLFCSLCMLLSRSSKCMSRLKMNTLLVCFNNAARPFIMYILTINSPRCLASLKRD

SEQ ID NO: 34758 - protein, 40 aa, Homo sapiens
LGLVFIVLVSLILNKHSLKELLIPRSKFSLSKVDFRLLKE

SEQ ID NO: 34759 - protein, 18 aa, Homo sapiens
IVVFFLLYITSSSAVRWR

SEQ ID NO: 34760 - protein, 35 aa, Homo sapiens
LRAPAASPVLSLLWPSAGWVTENFPTVKNRASLDK

SEQ ID NO: 34761 - protein, 17 aa, Homo sapiens
IILCLVITHGLSLMNLF

SEQ ID NO: 34762 - protein, 22 aa, Homo sapiens
MCIFLKMLSFTLLMTDLISDMS

SEQ ID NO: 34763 - protein, 110 aa, Homo sapiens
MEGCFLERSIGGGCWEDTGNGTGLCFRSTKRHEVGRRKGRRLSTPPPAAFTGSAERQPGGARVAVRSPETCVFYCTRCALEWSLGQSGSPKKIHQKTPKKGEAVTPHVLE

SEQ ID NO: 34764 - protein, 17 aa, Homo sapiens
MLWLCVMNQIVFILGMQ

SEQ ID NO: 34765 - protein, 14 aa, Homo sapiens
LQLFQTSTWMALMM

SEQ ID NO: 34766 - protein, 22 aa, Homo sapiens
VWIQIQLILMTVAMIGKSGLEI

SEQ ID NO: 34767 - protein, 51 aa, Homo sapiens
VGPRNLFSAGLRAAGSPAAAGSQNLWMDSSWEALLLCSSWTMFLINICLSA

SEQ ID NO: 34768 - protein, 59 aa, Homo sapiens
RSSSSNPWRRGWRRRRLSKAVCMWCIAGHPRPLLSGGHRPWTQGPPWTAWTASAAPWAS

SEQ ID NO: 34769 - protein, 32 aa, Homo sapiens
MLRTMTTTSRSCWAWMTLWCSSTGRSTYRSTC

SEQ ID NO: 34770 - protein, 18 aa, Homo sapiens
LFSVFLLSAHHMLCSLPI

SEQ ID NO: 34771 - protein, 19 aa, Homo sapiens
LVLASLGLWWPLHQTSLCL

SEQ ID NO: 34772 - protein, 23 aa, Homo sapiens
IPNLLFCFISPLGVVRRSSPCYP

SEQ ID NO: 34773 - protein, 25 aa, Homo sapiens
MGLWLLSWRVTMKIILLSSGMPLLL

SEQ ID NO: 34774 - protein, 47 aa, Homo sapiens
RPPRSPSCAVIHGKLLIPKIMYFIKSTSVEVWILSSAGHQVLFVCTT

SEQ ID NO: 34775 - protein, 30 aa, Homo sapiens
LKRPMTLAAGLLLMPLTETAILEALSICTT

SEQ ID NO: 34776 - protein, 29 aa, Homo sapiens
LRCFISSLMTGLWTGGAWELSCMRCCMAW

SEQ ID NO: 34777 - protein, 28 aa, Homo sapiens
KTMDQLGVLFVLLGKCFHWNLVEDLILS

SEQ ID NO: 34778 - protein, 46 aa, Homo sapiens
IIVDLWFHLLLIFCMWQMMKKPVISDFEIVYGKMKKRKWKFFILCD

SEQ ID NO: 34779 - protein, 24 aa, Homo sapiens
LLFFSMLTWLAEASGCVIFEKGRK

SEQ ID NO: 34780 - protein, 32 aa, Homo sapiens
RNVKSYSTHSSVMKQQTGEQWPAFQGWQSRKL

SEQ ID NO: 34781 - protein, 15 aa, Homo sapiens
LQATPDPPRAGISPR

SEQ ID NO: 34782 - protein, 30 aa, Homo sapiens
VWEHTLQSHSVSGFGCTVLCAWREEYFLFF

SEQ ID NO: 34783 - protein, 91 aa, Homo sapiens
ISFLHIQVRWRLLWRLGPRALETSALAPASLLPWPGAAALPRRQHGWPPGRGLGGGGPAARRGRLLLHLQADPGSAAGRPRARDTLFEVRR

SEQ ID NO: 34784 - protein, 47 aa, Homo sapiens
MKMMKCNTMKGKNGAVITSTTGLTIPWKLFTTRWTTLPQTFLTWRGG

SEQ ID NO: 34785 - protein, 15 aa, Homo sapiens
LTSTLRGPALAMLLW

SEQ ID NO: 34786 - protein, 16 aa, Homo sapiens
LSFLSRVTHSSSLGPF

SEQ ID NO: 34787 - protein, 45 aa, Homo sapiens
LRPLSESMSTVKKMRGLLRSRLLSSLLLKAPLRLHRRDPLEDFSS

SEQ ID NO: 34788 - protein, 83 aa, Homo sapiens
MQEAGGQCLWEQGSFSTVCSMPGALPLCITSFKSFIPGLYITSWQWSSCRAIPRHRKLWALLSTSIISSSSTGKTSWTLLMPS

SEQ ID NO: 34789 - protein, 38 aa, Homo sapiens
MSGGTSSVRCPKSWGTSLWSAWISPVTASPESQSPSAA

SEQ ID NO: 34790 - protein, 29 aa, Homo sapiens
LFQSWGTSLWSAWISPVTASPESQSPSAA

SEQ ID NO: 34791 - protein, 23 aa, Homo sapiens
VLGMVLHVLAIFPLQRDAQDDKI

SEQ ID NO: 34792 - protein, 32 aa, Homo sapiens
MSSPEFGPPTLGLKVDVIRGSGPPYLEDSAAI

SEQ ID NO: 34793 - protein, 86 aa, Homo sapiens [sequence omitted]

SEQ ID NO: 34794 - protein, 114 aa, Homo sapiens
KMRLAWLYLFFLFCFGFFFFFGLTQDLKTGTVKVTAVGWSEHPPKFTMWPRTLIAHCCFFNSHSKYEMRCYRKSLAILKATPLLSKENGPVLSQVHTGEVIALLSCKLCNAKFF

SEQ ID NO: 34795 - protein, 16 aa, Homo sapiens
ISRPLRLCRSLALVLG

SEQ ID NO: 34796 - protein, 69 aa, Homo sapiens
VISFVVVMESVYQKPGNVITWMNVEIVPMKRSVPKKQILQLLLLFNPVLTTSSSVYPVLPKFTLASPNL

SEQ ID NO: 34797 - protein, 17 aa, Homo sapiens
MMLMVMEILMWMMPKFY

SEQ ID NO: 34798 - protein, 34 aa, Homo sapiens
ISLGFGYTLIDLLHCLQAQLLICVQDEWDGRKYL

SEQ ID NO: 34799 - protein, 42 aa, Homo sapiens
MRLVLGTLWGGTEPNPVSAAWGLGPGVAKREEEGGSCCARNP

SEQ ID NO: 34800 - protein, 50 aa, Homo sapiens
RILAVTETTPSMRSMIIGKCCTMPLSVWFLVVAGLGPSDSWRLCRLPASL

SEQ ID NO: 34801 - protein, 20 aa, Homo sapiens
RIVRTTTVFILSGRFSLLLC

SEQ ID NO: 34802 - protein, 17 aa, Homo sapiens
VATPAQSWILALAPLAT

SEQ ID NO: 34803 - protein, 36 aa, Homo sapiens
VTVMARAAAWTASASATRASQAWTVASTPAPVTATT

SEQ ID NO: 34804 - protein, 36 aa, Homo sapiens
LFVCLFLPLGSAPALASRKPQHPFLQRGFLERRDAA

SEQ ID NO: 34805 - protein, 18 aa, Homo sapiens
KVTGLPAIIAAFLYLEKM

SEQ ID NO: 34806 - protein, 12 aa, Homo sapiens
MLTSILFILQCL

SEQ ID NO: 34807 - protein, 85 aa, Homo sapiens
ILRTQIPHSPMAAWTLLQARQTSAKPNRPETTLAPPYPHWNAVMKTCAITEGCTMFSLLPGVRPQDKETGISMMVAETLSPRCRS

SEQ ID NO: 34808 - protein, 37 aa, Homo sapiens
ILSLLVSTWILHLLRVIYTKSYRGLCFVTLEEFFTET

SEQ ID NO: 34809 - protein, 37 aa, Homo sapiens
MRGVERSPPPTLAISAVLLGPLKEAEAKMTFQIFQPF

SEQ ID NO: 34810 - protein, 46 aa, Homo sapiens
IMELGVEVCMTECDEEVMDMMVVMEVLMTMVAIIITAMGMMALMTE

SEQ ID NO: 34811 - protein, 49 aa, Homo sapiens
RACSLFSAGVAGSEGSWSAFCRSLWLHAHRLRGYLPCYLIPYHTTGPQP

SEQ ID NO: 34812 - protein, 36 aa, Homo sapiens
MMLLSGAMSLTWAFRIRCAWLVGVSLRRGYWRCRWR

SEQ ID NO: 34813 - protein, 19 aa, Homo sapiens
IYLHFMIFQFMQIRMCFTW

SEQ ID NO: 34814 - protein, 40 aa, Homo sapiens
MFFSLGFLLLFSPPSHLPFSPTPPPKKATSSFRGTIIFFN

SEQ ID NO: 34815 - protein, 10 aa, Homo sapiens
MGLLLMSLYG

SEQ ID NO: 34816 - protein, 18 aa, Homo sapiens
MRSSASGFIILTLCGQIV

SEQ ID NO: 34817 - protein, 16 aa, Homo sapiens
MLKFKIFIGHLAVMMS

SEQ ID NO: 34818 - protein, 34 aa, Homo sapiens
ITLLHVAFLLLGFCFCSELSCYLFRADVTCRWRV

SEQ ID NO: 34819 - protein, 51 aa, Homo sapiens
VSLTLWFMSCWLPWLSTRCLFHSDRRQMFSKCTKSSPLLMFCISNLKGTTI

SEQ ID NO: 34820 - protein, 9 aa, Homo sapiens
RKLGRRKER

SEQ ID NO: 34821 - protein, 9 aa, Homo sapiens
MSAWLFLLF

SEQ ID NO: 34822 - protein, 15 aa, Homo sapiens
VHGPMIAIRAILCWL

SEQ ID NO: 34823 - protein, 19 aa, Homo sapiens
IIKMTMVFTAGMAQAAMWK

SEQ ID NO: 34824 - protein, 24 aa, Homo sapiens
ISQTMDFSSISFLTVLFLSLYFHI

SEQ ID NO: 34825 - protein, 44 aa, Homo sapiens
MVQETLSHQVTQQMNMLIGVELQRLLVFQVFLFIQLDTMMHRSS

SEQ ID NO: 34826 - protein, 49 aa, Homo sapiens
IMLFCLWAMALTQPLGWITGLLKTAGAPAGVRMATSGSAEELMSVQLRA

SEQ ID NO: 34827 - protein, 36 aa, Homo sapiens
KLPFSVVLMFLSAGPIVPLLRNVSPVQGQRLKRLLY

SEQ ID NO: 34828 - protein, 22 aa, Homo sapiens
LFLGSLGMSACLRLLLVGWKER

SEQ ID NO: 34829 - protein, 26 aa, Homo sapiens
RLTLMCLDPVWTLMLLIWILRDQKES

SEQ ID NO: 34830 - protein, 11 aa, Homo sapiens
LIAVILATMQV

SEQ ID NO: 34831 - protein, 47 aa, Homo sapiens
MVFSIRGFSECLVPRWKSMILKIHLREVKILWLMTRVTMILTQLLAF

SEQ ID NO: 34832 - protein, 25 aa, Homo sapiens
MGSTFSGLTGCGGQCSGPTSTWAAT

SEQ ID NO: 34833 - protein, 31 aa, Homo sapiens
MCEFFSVSIWMCPVLSCVFSALSMVSFSENE

SEQ ID NO: 34834 - protein, 36 aa, Homo sapiens
TPSLAFLLSLISLFQRRPNLKSFPGSGSVHLIRQPK

SEQ ID NO: 34835 - protein, 44 aa, Homo sapiens
MEKLTLWLWLQRKMGPLCSSFLNGGSRARPSKKWQKPTDPWVQS

SEQ ID NO: 34836 - protein, 89 aa, Homo sapiens
MAAVMSTSLARSSTAVMAAGPTAAAAPMSTVSPAACSPTSNFSWSASSTGQPWHSRTSSWQSKITLSCAWPNAGPHLRACSMRTPTGTP

SEQ ID NO: 34837 - protein, 38 aa, Homo sapiens
MRSPLSASALLLWSSSVARAFSSPSLLMAVPSPTCSRY

SEQ ID NO: 34838 - protein, 32 aa, Homo sapiens
TMHLQILYSLMLLGTVLWTNLKSKGQAENRKV

SEQ ID NO: 34839 - protein, 21 aa, Homo sapiens
ILLQCRARFLLLLVLSQTQDL

SEQ ID NO: 34840 - protein, 19 aa, Homo sapiens
MPRVAKLGFLVVLELARLY

SEQ ID NO: 34841 - protein, 25 aa, Homo sapiens
IFQWTVLALVDISCTWPAPFLQRIC

SEQ ID NO: 34842 - protein, 35 aa, Homo sapiens
IWWPSGWAAHWVLVSTSWLELWPVRMQALPLSSPS

SEQ ID NO: 34843 - protein, 29 aa, Homo sapiens
MGVIRMYFLIILVWEQIERDAWKTQKTLE

SEQ ID NO: 34844 - protein, 24 aa, Homo sapiens
MPWLHLLMIWISGFTSEMNLCVVD

SEQ ID NO: 34845 - protein, 9 aa, Homo sapiens
LCWLWLWQM

SEQ ID NO: 34846 - protein, 14 aa, Homo sapiens
MVLLLLLFVNSNEP

SEQ ID NO: 34847 - protein, 60 aa, Homo sapiens
IMTRSWLIVVSGVGTKAQMSVPFNRFWAPKRNTSALVRTGIKSPSVDRKRLCYMNVALVI

SEQ ID NO: 34848 - protein, 18 aa, Homo sapiens
IPVHFMLWLCRAQCFSFV

SEQ ID NO: 34849 - protein, 25 aa, Homo sapiens
LESLSRQRECWRMLVLWALLSSSGL

SEQ ID NO: 34850 - protein, 67 aa, Homo sapiens
MGGSSPRPCILKAAYLRACGLAAGTHPRGGAAIVSGAPAQAGRSSCFPLLCCLPGVPTWPRSVLPAP

SEQ ID NO: 34851 - protein, 25 aa, Homo sapiens
MLPKLISNFLAQVICLPSKVLGLQA

SEQ ID NO: 34852 - protein, 80 aa, Homo sapiens
IKMVLLMDMLTVWMEKLLSSVIVMIQKHKAVLFKMGRKKMQLIPYYSSIKCNPLKKNYMSLLLLKQHKSAGENTYFLVIN

SEQ ID NO: 34853 - protein, 13 aa, Homo sapiens
LLNFYLSFLALNM

SEQ ID NO: 34854 - protein, 10 aa, Homo sapiens
MIWCIIILLR

SEQ ID NO: 34855 - protein, 38 aa, Homo sapiens
MKFDFTLEMTLWMFGIGISAGQSRTILKVGRRVICQRY

SEQ ID NO: 34856 - protein, 21 aa, Homo sapiens
RNFQSPGQFPGWLKALMSALM

SEQ ID NO: 34857 - protein, 95 aa, Homo sapiens
LSPRVGAARQGQPSTTGSPAVSRLTGRCCVGGAALAWVCMWVQPWEHCGSASQEPWRSRSLKTQWWHWWAPMPPCAAPSPLSLASAWHSSTSSGS

SEQ ID NO: 34858 - protein, 30 aa, Homo sapiens
LPTRTRTTGPGCAAGMCGWTAAGLLTMALA

SEQ ID NO: 34859 - protein, 26 aa, Homo sapiens
ISLSNPLPSWVTLAVGLGSLPWVVKM

SEQ ID NO: 34860 - protein, 38 aa, Homo sapiens
RDISWEWCLWTSATPCPLLHPALLMLIFVFGTWKMANR

SEQ ID NO: 34861 - protein, 7 aa, Homo sapiens
LIFLLLA

SEQ ID NO: 34862 - protein, 30 aa, Homo sapiens
TVPSGLILVLMGRIAGPRSTRRVGACCSPP

SEQ ID NO: 34863 - protein, 25 aa, Homo sapiens
LKKILVSFIFRLIICSLNITEHEKL

SEQ ID NO: 34864 - protein, 12 aa, Homo sapiens
MGGVGLVLLWLS

SEQ ID NO: 34865 - protein, 78 aa, Homo sapiens
LHPTMTWRVFLSVQSALTMCYRPFFNVRVAILFVATVAQSSHVVQLAGALWDPFATWLWRKWLIQYFSPVNMRLLDVK

SEQ ID NO: 34866 - protein, 126 aa, Homo sapiens
MLAVPVRLKVGSRKPEWGTNRLTSCPAKDPLDRRLQNLRDRERVPEPQRSLRPGVQEDSREHGQVPEVSDPQVDLEFVDLQAKPRYRRLILKTQIPEASDSQAAQKPQAHRQIPETTEAGRETTSN

SEQ ID NO: 34867 - protein, 41 aa, Homo sapiens
MTTYATLPIYLLVLHQSKARKRMVPLTHIHLRDEDWYLTIS

SEQ ID NO: 34868 - protein, 56 aa, Homo sapiens
TPVWWRSWACMTLAWALPWGPIRASVSKASCSLAQRPRKKNTSPSWHLGRLWPLSV

SEQ ID NO: 34869 - protein, 30 aa, Homo sapiens
LPFLFFRCLLYFPKFLLLLCPLRPPPLGAP

SEQ ID NO: 34870 - protein, 9 aa, Homo sapiens
LLACSLLLA

SEQ ID NO: 34871 - protein, 8 aa, Homo sapiens
IWSILLVM

SEQ ID NO: 34872 - protein, 63 aa, Homo sapiens
TTMRSTLAASIPTISSQGSSGHPFTKDWIVLWKSVLYMGITPSSFRFTQKRGSTVMGNWAMNQ

SEQ ID NO: 34873 - protein, 30 aa, Homo sapiens
RRRWLFGGSEERLLLLLLLLVAPLQMYCCP

SEQ ID NO: 34874 - protein, 22 aa, Homo sapiens
ILASLLLHLLSLPSPLPRKPPI

SEQ ID NO: 34875 - protein, 36 aa, Homo sapiens
VDSGLELSWGSLFAAAAAAATAVLGARSPGKKPSHV

SEQ ID NO: 34876 - protein, 25 aa, Homo sapiens
MARARAVAAVAGGGGASSSSPRRRR

SEQ ID NO: 34877 - protein, 18 aa, Homo sapiens
RCFVVSVFLLFTLPESVL

SEQ ID NO: 34878 - protein, 53 aa, Homo sapiens
MNLLCIAPMFYSALMTSGRKMCCAMSPSLWRDSGSALTGPCWRHAAVTSTQES

SEQ ID NO: 34879 - protein, 59 aa, Homo sapiens
MPLTPAGPTPIMILCPKLIYTSGSSSLLKTNAQMLFTDIYILVSLSCPTLLLFPIPNSS

SEQ ID NO: 34880 - protein, 69 aa, Homo sapiens
KRSSRRARTAAARRSTTTRGGAAASGCCSSASTSSASSWRASPSSSSRQAPSSLTTEGFTAMMRASSTH

SEQ ID NO: 34881 - protein, 12 aa, Homo sapiens
MVYLMLKMSLVF

SEQ ID NO: 34882 - protein, 53 aa, Homo sapiens
MMLMSLSEILSVLFLLHCTEPLRVECEVLIYVCLVELSYQEHIDALKDNPRRV

SEQ ID NO: 34883 - protein, 56 aa, Homo sapiens
TPLTSVYLRVRPILPAGLCLGVTLPELAPTTVATVMLMCDCCQEPAHMTVWRKFFP

SEQ ID NO: 34884 - protein, 32 aa, Homo sapiens
VKENSCESSQSRPCLLHYQMLKFFKNQSFGGI

SEQ ID NO: 34885 - protein, 27 aa, Homo sapiens
MSSGEFAIKLAKLTYLGKKVIKQENMR

SEQ ID NO: 34886 - protein, 80 aa, Homo sapiens
TGSPAVSRLTGRCCVGGAALAWVCMWVQPWEHCGSASQEPWRSRSLKTQWWHWWAPMPPCAAPSPLSLASAWHSSTSSGS

SEQ ID NO: 34887 - protein, 36 aa, Homo sapiens
LQLLPGNMSRAAAATAAAATWGRAAAAAAAAGTRGQ

SEQ ID NO: 34888 - protein, 22 aa, Homo sapiens
MMSLFIARLYMMLCKTWIRRLM

SEQ ID NO: 34889 - protein, 32 aa, Homo sapiens
MEYLEVLKLLFLMTLSCLTSLLSGGMILCTDG

SEQ ID NO: 34890 - protein, 68 aa, Homo sapiens
MTSTPMQPLQLLQDMLLLGAMATQSSSQSPQRHLGQLPPPLQQLLPLQHLASTSLSSCRQTECNRPAI

SEQ ID NO: 34891 - protein, 33 aa, Homo sapiens
MRGGTRFTLGLADLCTTGARALLRKAGFPLYLH

SEQ ID NO: 34892 - protein, 57 aa, Homo sapiens
MCVSQVAGPTGAVRSPPDSVPAPLLAICDLGPVILLSLASLIFKMWLMPALGNRCED

SEQ ID NO: 34893 - protein, 13 aa, Homo sapiens
MKCSFLTFLLQLV

SEQ ID NO: 34894 - protein, 23 aa, Homo sapiens
MRTGATAAIALCSSVSWCTANAK

SEQ ID NO: 34895 - protein, 38 aa, Homo sapiens
MELVVSWRAAWRRPGGASTLSGAGMSLSSSLKKRRPKS

SEQ ID NO: 34896 - protein, 65 aa, Homo sapiens
LGLRRRLRRGGCRWAGCLASLCAAWALSRDGRAGPGGRLSPAGDRRAGGSGTCRPGARVPVLGAE

SEQ ID NO: 34897 - protein, 71 aa, Homo sapiens
LGLVSADLLQWRRRRHRHLAVSLGRRRLYSACRPTDYPSRIYAPRILRSSALSLSSLAGAPTGGLIGYIAA

SEQ ID NO: 34898 - protein, 117 aa, Homo sapiens
LGSGLAGALLGGPAASRGVRGARGLAVAELQHQLPSAGARWPGDLAAPKRDPEGFALVGAAAGGHSRAGDSARLLLPLRAAHTTGAWAHSHFPATRSRRADAAASLAAGGRELHPEL

SEQ ID NO: 34899 - protein, 139 aa, Homo sapiens
LNSLLSLACSPEALAPQCWAYLAILCQPPGHPPSQWKLLPPLTMVFLALGSGDKTISFHSWTTLCTQSAASYLPSCTGSEPPDLDFALGSFLGTCCSLASLEGSTGLGVRRWSSGCCFPTLGPWACSVLCIRCFLPASP

SEQ ID NO: 34900 - protein, 74 aa, Homo sapiens
LRRSLESVSSGRTFDGILMCLLCLIFSKTLTPTQASVIAADQKPEHFGSRQLRTWDEAPRQDAVLPGDPEDKKL

SEQ ID NO: 34901 - protein, 33 aa, Homo sapiens
LPLIAWFSLQSPAAVVGSCAFGCNKYVDYSRIN

SEQ ID NO: 34902 - protein, 34 aa, Homo sapiens
LAVFVIIRNLSDYLSFFFPFLLELLAVEEHHAYL

SEQ ID NO: 34903 - protein, 97 aa, Homo sapiens [sequence omitted]

SEQ ID NO: 34904 - protein, 105 aa, Homo sapiens
MLKCPRIRSATHAGVVRSPGRQRWRLLGVLGSLPPRPAPARLALRNSLFGAADFLVVPHKSKAWGPGGSRKYRFEIPKYYRGNGSGRRWQVWGRPEVTRPVGHGA

SEQ ID NO: 34905 - protein, 33 aa, Homo sapiens
MALAKSRWYSLVFKMLSIKFFGIITSSRTGCLP

SEQ ID NO: 34906 - protein, 60 aa, Homo sapiens
LRSIVAPNVCRAPPWEGGLQPGNWETWVPVERPHHVVLCHILLPLWTLSLVLPVVCLPLT

SEQ ID NO: 34907 - protein, 46 aa, Homo sapiens
LRRDDKESGQGGMTLIDSKASLICQAEGALLVFLGLFQRGQLSSGK

SEQ ID NO: 34908 - protein, 21 aa, Homo sapiens
MGKWRENLKEPQTRGPIAPQE

SEQ ID NO: 34909 - protein, 54 aa, Homo sapiens
LLASLVGSSSWPRQTGGGSGPDCGAMAVVSSFAAAASLAESPASALGAPTASAG

SEQ ID NO: 34910 - protein, 43 aa, Homo sapiens
LLVLAGGEHSSVAILRPLLFLRWSPTCLDQLNGSAPGNVFIHG

SEQ ID NO: 34911 - protein, 27 aa, Homo sapiens
LTTRMKNEEVLRSNDCEETHPLSWHSQ

SEQ ID NO: 34912 - protein, 112 aa, Homo sapiens
LCVLWVLGVTFSLGSRESPADGFCPGLKQPESYGKGRAWLARGIFQVLKRQAYGACDPSRRTKWDLKIHSTSAHGGPGPAPARGHTADWAAGMPGLCWRPLWLAFTSVCLQE

SEQ ID NO: 34913 - protein, 213 aa, Homo sapiens
MVSGRHGTTRRAAKRLRRSSVLPRRRRRPAAPSFPLPSPRAAPGDPAQHPAARLLPARPESYGDERRRRRPGDTAGVLYVSHRSEERKAAVSCGESRSLHCPRGARRLSRSKAGNGRQKRSQTPTGSGLPPRGSEQRSRASPARSCRHVPSCAARAPPCSESPVGAGLRPSPVPGPPPAPRCRTRRRPALGADNRRRASRRGCRRLRQTAAKA

SEQ ID NO: 34914 - protein, 26 aa, Homo sapiens
LRFFLVFCILFITMQETISSQEDFYL

SEQ ID NO: 34915 - protein, 48 aa, Homo sapiens
VGWGWCELPAWPQLVRSSALGSFVSGSGLALCPRVFVPLRSALPGQEP

SEQ ID NO: 34916 - protein, 104 aa, Homo sapiens
LTLLLPRVLSHLAAAAPVQTLTLPPKAQPSPNNPQPCTDVGCESLCLSKNQALLETFKQRLDNYFSRTERKLMHQKSLRNFWGPTINLQRPAFWTVLKTSQQEK

SEQ ID NO: 34917 - protein, 69 aa, Homo sapiens
MSRALQTQAAVSPASRAGTGPSASSPACLAPLARAANSSALTADMGRPVSQILATVSAVTLAGWGPGVL

SEQ ID NO: 34918 - protein, 76 aa, Homo sapiens
LGSAVSGVCAAPGSAIAALLAPGASAPDPSSFVCLPVSCVPGEDPAEPSLPPPLLLLSLGEPGQPLPRSPSDRRRP

SEQ ID NO: 34919 - protein, 167 aa, Homo sapiens
LRRGAGHTRLILRGCCLDEKRWGCWRLLAAHIWLGFAPCASVPLSPSLPLLSRNRASASGRRDLGDRAGETEVLWVGGTCGCSYRPPPSSSALPSSGRPFPLLCFLHRVCASPRTWPGGGLAGGRCSRGGAGGAAGGTEGPAGRWAPVDRDSCWRTACSLPLPLAWS

SEQ ID NO: 34920 - protein, 26 aa, Homo sapiens
LTWIPLCRKEGDSSPHLLLRLGLATW

SEQ ID NO: 34921 - protein, 38 aa, Homo sapiens
LSLFSILAPTSGFFLRDGPSDAWANGNRHLGCSAHRVA

SEQ ID NO: 34922 - protein, 35 aa, Homo sapiens
LTSARRAEPRALSRYLRPARAATLCPAFAIFCWQR

SEQ ID NO: 34923 - protein, 21 aa, Homo sapiens
MTIIGFRMLLSSSDASFLLAV

SEQ ID NO: 34924 - protein, 37 aa, Homo sapiens
LSWSEGWLFRLSFLPACTPPTASEEGAAPGCVHFLGT

SEQ ID NO: 34925 - protein, 49 aa, Homo sapiens
MGGKSAWTQMLPESRKLYRKNWQVMNLLINLFCFCQTSLTPRKGRILKP

SEQ ID NO: 34926 - protein, 13 aa, Homo sapiens
LSELRFVLVLCTL

SEQ ID NO: 34927 - protein, 181 aa, Homo sapiens
VPGPAGSLPSSAFRSPTPGRLPGGPGATQPLARPTLCADPGCKRSPGLWSRRSCEGDQPRPLRGHRGGREGKGLWVSTLFGLRTDGVYSMQGVINSNSPFRSFIPYMLNDNLVPNAGMLKLREGRCLASTAATPRVSLLFPGLQCSGTISAHRNLRLPSSSDSPASASPVSGITVKLKQAQ

SEQ ID NO: 34928 - protein, 53 aa, Homo sapiens
LVARSVLSFPVGDLCRKHAPPDHRSGQEASERKFVTALLMFSLVLLASGCAFW

SEQ ID NO: 34929 - protein, 37 aa, Homo sapiens
MCAFKPLIVRCWILEAVMAQMHILAEDNQLSDFTSLF

SEQ ID NO: 34930 - protein, 35 aa, Homo sapiens
MRSLGPLAALPSCSLWTLFLYHNSSRGLKCDVHKS

SEQ ID NO: 34931 - protein, 66 aa, Homo sapiens
VGGASGASRGLVGGARRALPVSGRGMRGGAGAAVGEFCCCGGACTLTVGNSETSSHLPVGNLLATG

SEQ ID NO: 34932 - protein, 141 aa, Homo sapiens
LSQMRLCTVDFRVQGRRYFSRLSLMGAFLLATSLKWNLLVALLPLQLWCYTEKLEETGFHYVAQSGPKLLVSSSPPISAFQSARIIGMSHYIQLLLVSSDSCFDTTDLSFKTDKGKRETSESLIKVEASYFYQRIHCAWTL

SEQ ID NO: 34933 - protein, 17 aa, Homo sapiens
LSYLLKVHVLLMLTLID

SEQ ID NO: 34934 - protein, 44 aa, Homo sapiens
VELTIPQTSKPLQNPRRNRIQKDLLLLWISSKVLLWSSFKTRIP

SEQ ID NO: 34935 - protein, 12 aa, Homo sapiens
MEACDFPGIMHD

SEQ ID NO: 34936 - protein, 54 aa, Homo sapiens
VTIQPFPIRLPLLPPLISFLHTLQVVCSVIMKSIRKAFVLCGFLYFEFFDQKTD

SEQ ID NO: 34937 - protein, 55 aa, Homo sapiens
LDRGGWGVRGAVGSPDSPRHSLLCSRMWAWALQAGWVWAAWCACGGCIPTAGTEA

SEQ ID NO: 34938 - protein, 74 aa, Homo sapiens
MHFIHPCVRLPACASIHPSIRPSIHPSIHPCILFPARRQRTHSLLGEEVINLGLGGCPIQLRSPLRSLLQIGSD

SEQ ID NO: 34939 - protein, 173 aa, Homo sapiens [sequence omitted]

SEQ ID NO: 34940 - protein, 45 aa, Homo sapiens
MALMKMTGMAGVSSFSRASAMTPVWVSQRAPAGTVWLRVRCAASK

SEQ ID NO: 34941 - protein, 56 aa, Homo sapiens
LMKMTGMAGVSSFSRASAMTPVWVSQRAPAGTVWLRVRCAARVAAAGEWVRLGQPA

SEQ ID NO: 34942 - protein, 40 aa, Homo sapiens
LATVFLLICDSLLLLCSFTSCVSREMKERPANSLQPVDSK

SEQ ID NO: 34943 - protein, 33 aa, Homo sapiens
MFFSRAFGWCVALPTFTFWTSSLRNALSDHAEV

SEQ ID NO: 34944 - protein, 76 aa, Homo sapiens
MPVVVFLCVLIHSKGSRCRMPLLLWGQTLLSLSVSISTVLPQHQSMHQGSTQAQLSPPPSSSLTFTKGWLSSPWVP

SEQ ID NO: 34945 - protein, 80 aa, Homo sapiens
MPPTVRRGCWARPGWSLGLAGAAQNCLLRKRCSPGPPLSPGLSKASEVLPSSRLDSSVICLRPHSRVQLETEKPARGRGR

SEQ ID NO: 34946 - protein, 26 aa, Homo sapiens
LLLCSLGMLLCLCIWSLFGATVDRHL

SEQ ID NO: 34947 - protein, 34 aa, Homo sapiens
VGSFEGVASDREVRLLFSPCFLSPLNLGLLFGSD

SEQ ID NO: 34948 - protein, 18 aa, Homo sapiens
MGSPTAEQMVVTKVNKEV

SEQ ID NO: 34949 - protein, 94 aa, Homo sapiens
VATSGPWGWARSFCFWLASSLLHLRELLLSPTVFVITSRCCPGMDLCSQGFLLRYIWMVSPSCAMTGRNAGQSPRDSGQKMSWEIRHGTERPGT

SEQ ID NO: 34950 - protein, 54 aa, Homo sapiens
VVHRSQKALLVFRRTLSNLLYMPLLRGLLWLQVLCAGPLHTEAVVLLKQKVWCK

SEQ ID NO: 34951 - protein, 62 aa, Homo sapiens
LAFQWPSWNGRKLSWTLCHIVRFPQQPDEAAAEKMEAILVNGSHLSSWQRKKRKDPLVRNGD

SEQ ID NO: 34952 - protein, 58 aa, Homo sapiens
LIVPPQPPGMFHHNPVATSECIFVIPLATISIAPSLLLTRLLPLLGAGERNRKLNLGF

SEQ ID NO: 34953 - protein, 29 aa, Homo sapiens
LYHMMCFTYAVVYIPNISIFDFILIHLVQ

SEQ ID NO: 34954 - protein, 46 aa, Homo sapiens
MLLARNPGSATLENSSSHNNFIQFIFKAQLYFMLSVIIFLDTFQIL

SEQ ID NO: 34955 - protein, 29 aa, Homo sapiens
LNCLGCTAILTAASIIAFFSTIRLSKAKE

SEQ ID NO: 34956 - protein, 69 aa, Homo sapiens
LLVLSSSSLAGHRDFWTGNCTILFSQQGGSRDCPPRKSGGLGIWWVCSLAVAWGSVCVSGVGSGNVLRI

SEQ ID NO: 34957 - protein, 52 aa, Homo sapiens
LAGHRDFWTGNCTILFSQQGGSRDCPPRKSGGLGIWWVCSLAVAWGSVTVPW

SEQ ID NO: 34958 - protein, 24 aa, Homo sapiens
MFFTIIVMLIFTESKRKLEMIGSL

SEQ ID NO: 34959 - protein, 67 aa, Homo sapiens
LAQRTQRGPKTGAGGRAPSAGHRAPSGGGTRGPAPSSAPARRGLQPGPAQRRPAGMRSGGRRRPRPG

SEQ ID NO: 34960 - protein, 43 aa, Homo sapiens
LGSGIRSAPAVVAAAAAAIAAGLPQAQGLCLKALCRAKLISGT

SEQ ID NO: 34961 - protein, 79 aa, Homo sapiens
LYLSGPVLVMISLLTEAVPQKQTCNRRNRSQCHPSAVVTSKKVSRHGQMSPGGQNHPQLRTTALNYGVSLCHPGWSTVA

SEQ ID NO: 34962 - protein, 77 aa, Homo sapiens
LTCPVLVMISLLTEAVPQKQTCNRRNRSQCHPSAVVTSKKVSRHGQMSPGGQNHPQLRTTALNYGVSLCHPGWSTVA

SEQ ID NO: 34963 - protein, 76 aa, Homo sapiens
MRMAPLEILSCFWFPWQGLNCGVCGLLSRDGIHCGRRRHSSAPRIPQGAPRCLPSKSVLQLEGAGAVHGRGGHAPL

SEQ ID NO: 34964 - protein, 51 aa, Homo sapiens
VTLSTRARGSVRSGRFAVAGAWAAGCLTSLPLAHSDLCSDPGCHDSRNPYL

SEQ ID NO: 34965 - protein, 90 aa, Homo sapiens
MMLGSLAPDPGSRRHSGQAALRPRRYPTLWDRCRKRWLRPIFTQLLAAGLAYHTLLPIPSEPLFAAPGEHLHQCFVKESYCPPRVLAKEQ

SEQ ID NO: 34966 - protein, 22 aa, Homo sapiens
MRSIQSICTGIVRPACQGGLGG

SEQ ID NO: 34967 - protein, 83 aa, Homo sapiens
LLKVSLWVIAPSLFNGSLPASILVLWERPAFWCCSQEWSLTALWKPHRRKTLICPRSCLTPPLDRPSPRFYTVLPARRHDEAM

SEQ ID NO: 34968 - protein, 110 aa, Homo sapiens
MDLWTLVAVTQCQGIYLALNSGQKKTQTLSCGLGPPILIKVWFHLLPHKGAIAVCTSESVYNLRIEIIACSSKPFTVEWKPVIFLASCMTEKVSVANSELQHQETRSSSH

SEQ ID NO: 34969 - protein, 55 aa, Homo sapiens
LARPVLGLLLLLTTTTTTGAASAVPGVSSCSGHTAPGDCSSSNQNLGLTGTLAPK

SEQ ID NO: 34970 - protein, 46 aa, Homo sapiens
LAVCALRLHLYVGSLGSISAVVFELAGRAFERLVAFGFTWLRRDDH

SEQ ID NO: 34971 - protein, 41 aa, Homo sapiens
LQAVSAPTLLACEHLCLRMGFWVGVLVFLCSFKLSPTNRKL

SEQ ID NO: 34972 - protein, 115 aa, Homo sapiens
VEEMPLSRRSGDSPAPRIPGWRDASRPRGLVARAGRRTRRRALPGLAWACSEPGCFSVTTQIGGIWRFCGSPAAKLRGRRGLEACTTCSPRPSMHPGKRLCFSVRAKVCKEGGGN

SEQ ID NO: 34973 - protein, 46 aa, Homo sapiens
VGGAPGQTLPPVLYIATSLWRGHLGSPPLVLLPVCVLVLRMRTVCL

SEQ ID NO: 34974 - protein, 88 aa, Homo sapiens
LMTRPPPPPCNRSPGPLNADTDDPRRGRWARGAQATGRGLSGPLLPPASAASAVMTLGGAAAISSVPWTLPEFVKGPRKKRLFHPSPQ

SEQ ID NO: 34975 - protein, 52 aa, Homo sapiens [sequence omitted]

SEQ ID NO: 34976 - protein, 63 aa, Homo sapiens
LSPVGSAQDHPLLRRLLAQRLPALAPAARSPALLPPLAALLLPLLSPVLHALSPQPLPGGGYM

SEQ ID NO: 34977 - protein, 82 aa, Homo sapiens
VGSAQDHPLLRRLLAQRLPALAPAARSPALLPPLAALLLPLLSPVLHALSPQPLPGGGAADWSCSYLAILEGTHLISPNGYM

SEQ ID NO: 34978 - protein, 36 aa, Homo sapiens
LGLGLASLLLSLQTAYHETSSCDRTHSKNLLCFKIV

SEQ ID NO: 34979 - protein, 40 aa, Homo sapiens
MIAFLFVRFVYIFRIRKKSHKPMMVSYPCLKIWTEGNNLF

SEQ ID NO: 34980 - protein, 168 aa, Homo sapiens
LSCFSFSFLFFFFFFLRRILTLWPRLECSGAISTHCNPRLLGSSDSPAPASQVAGRTGVSCRTQPVSLFPLFFFLISFLGCLSAFLSACFASTFSCVLGSPETSFSPCLHPPPKVLSSHPHPLQPSMPQPPKGPHCQSMPAHPRCALVSVYVCVCVCVCVCVWGVGGG

SEQ ID NO: 34981 - protein, 13 aa, Homo sapiens
MKLKNHLLLCLWI

SEQ ID NO: 34982 - protein, 34 aa, Homo sapiens
MAQAIICGALSVVCPAGRAGVTSARNPDGPDRPR

SEQ ID NO: 34983 - protein, 345 aa, Homo sapiens
LAAGTAAGAAPGLRGARGLPLAAAAAAAANVPAARRAPGRPRLAGGASLPRDLRAPAALAPAGLRVLRGRRGLRRACYGPGRRLRPPTLRLVAAPAAGPRGCSALVGEPRSSPCAQRAAPRQGAEPEDEPAAGAAVRGLRAALLCRPAGGRVVVRARGRLGGRGPVGGAARGGDGQQRSQSLRLPLLPGGRLPAPATAAEAAGLSVLRAAGRRGGRGGAPGPPGALPPTLAPPSLSPCSAGTAGRGRLAPTPSAPQTPALLLRKCLLGAWWSETGHLSLRRNLQGTRGLPGSVQITRGRRVCERVTLKLSPSSTLLFPSHVYISLCSSSFSSSLQFLSYLPIWRQ

SEQ ID NO: 34984 - protein, 35 aa, Homo sapiens
MDTCPLCLSAGFCAAGSGHSTRPADSSCRLHHPLH

SEQ ID NO: 34985 - protein, 34 aa, Homo sapiens
VRAGFVAAAARAGAFAGLVAPAHFYSSPVLLFRI

SEQ ID NO: 34986 - protein, 100 aa, Homo sapiens
LCASGVCAWSFSAWICLFIALLVETPKPVHPAKTPRAACGSRTLHPFPGCPLQAREAIRACWLRPPLSQAWLSPLRGRSPATPRGAGIPGMQAHSAGLHP

SEQ ID NO: 34987 - protein, 34 aa, Homo sapiens
LRKKLKLTVDILCLSSAANRAVSRAATMMILAGS

SEQ ID NO: 34988 - protein, 89 aa, Homo sapiens
MQMRSVWPGTKRQTRRRRRWCPEGARCPSAAASAATRVSGWCTEPRAPSPTGARAAGPRPRGPACCPSTRPSAAPWRRISRPTQSCWRR

SEQ ID NO: 34989 - protein, 51 aa, Homo sapiens
VVSWTLHGLCFLPPSPFTPALLFLLLLLLRLSPFTSAPGRSSLPTFPSSNM

SEQ ID NO: 34990 - protein, 82 aa, Homo sapiens
LQHSLPVFPLPLASSSSATPFTCPRPPPSYNCTVPLKAFSDFLHLPSSLFSLSLYHPDSYPTPRMAPSGSLFSSSLSLELQP

SEQ ID NO: 34991 - protein, 224 aa, Homo sapiens
LRRWSGEPGFSPPAPSFSSLFSFPLLSLRPPAAAPQERGRFPGCSPLLSLVCPLVFPRSAEGTGWRLGSVRGRGQERGLRACRRCPASRSAGAAGQPGPALRPSAVSRGRPGWGRVTLRPAPAWWGLRGAGPPRAQGVPRRCGSSVPLFAESWASKECSAGPRGGQQVPLAPPGLLWWEPTRTVASLRLQATLEHRRGGRSGLEGFTPQQSSEPNPGLRDPPGA

SEQ ID NO: 34992 - protein, 41 aa, Homo sapiens
LAGSGAVRLGVAGGASICVAAARGVPGLVLRRPPSGGSGCF

SEQ ID NO: 34993 - protein, 60 aa, Homo sapiens
VRTRFLPMNLLCIAPMFYSALMTSGRKMCCAMSPSLWRDSGSALTGPCWRHAAVTSTQES

SEQ ID NO: 34994 - protein, 52 aa, Homo sapiens
MFYIYHSEKVLFFNNILLTLFCLPLACLRNVFGFDYTLSFCNKFDSLKTFFF

SEQ ID NO: 34995 - protein, 30 aa, Homo sapiens
VKGIHLCLSTMALMIHCWGEETRKVTGCHL

SEQ ID NO: 34996 - protein, 9 aa, Homo sapiens
LLGFSVMMV

SEQ ID NO: 34997 - protein, 43 aa, Homo sapiens
LRALCPGHLAALHLPATSPPRPWAQEFCCSCWWPQLGMVRESQ

SEQ ID NO: 34998 - protein, 51 aa, Homo sapiens
VVFFFLFFFFFLIRGYGVLLCLPGWSAVTQSQLTVTSASWVQETLLPQPPW

SEQ ID NO: 34999 - protein, 55 aa, Homo sapiens
LFCFIFVFLYLLGLFCLNPSTAGRLINHTENVEGFMGEGVEMWVFETKVYKQMNC

SEQ ID NO: 35000 - protein, 34 aa, Homo sapiens
LIFKLLFYDLFLMIEPELVETTLIISRSLQETGA

SEQ ID NO: 35001 - protein, 48 aa, Homo sapiens
LGVCCVYVIHNVYCTDVWGLCFMIHYSQIICWFMDILPFHFFSFPVFR

SEQ ID NO: 35002 - protein, 347 aa, Homo sapiens
MTAVWTATARPGPPRAPPPCSAACCCWGWPPAWAAEPRPEDAPRTRRPGVPGSRGGAGVRGRAVRRVRPEVLPGATQQGPPPGPRSRPHCPPPAAGAPWDSGPRACDLVSFFFCIIRRPVPFLSFSLSLFFFFFLAVSQRVGRNAARPTPRPASHHTYTHGTVADTPWPVPGSRAAADPDLQLPTIPVADLVLFSILYFSCNPPDPRPHRRPGDHGTHRLGEEERRKGWGAWKLRSVENYFCLYSLSPARGTGREHWSPRGPMVENPRSKEFAHCCLHGLFSFCVGDGGQVWGLQRNPQHSLKETVSLLGPPFPWAFLWIPAGSAPSPQAWLAEFSTPRPGCRCPTC

SEQ ID NO: 35003 - protein, 18 aa, Homo sapiens
LSLTSWALASALLLVMWC

SEQ ID NO: 35004 - protein, 20 aa, Homo sapiens
LESAHQWKTLKVVVTDLIKL

SEQ ID NO: 35005 - protein, 65 aa, Homo sapiens
LSSRGFPLLFLPPPAPVHLQMPSPGPLKSQSCPLFLLPPTSPCSPAAALPWSRVPGAAPCSPTSH

SEQ ID NO: 35006 - protein, 11 aa, Homo sapiens
LCFLFGSIGVL

SEQ ID NO: 35007 - protein, 37 aa, Homo sapiens
MKWLSTDLFSKVAMICMTAASPRESSRRGLPNRCCGI

SEQ ID NO: 35008 - protein, 69 aa, Homo sapiens
LAAVALASGGLGLCGASSVLQKGSSSSRPGRGCRRPGRSRGGLQPGLAPRGTGPAARRAHLSHSRLAAL

SEQ ID NO: 35009 - protein, 92 aa, Homo sapiens
LPLASVFFLRPSLALWLRLECSGVITAHCSLSLLSPQPLGSWDHQRAPPLPATFFCIFSRDVGLAMLARLLPNSGAQAIRPPGPPKVLRLQA

SEQ ID NO: 35010 - protein, 22 aa, Homo sapiens
LVITVIFLTTLFYRSLSENDTC

SEQ ID NO: 35011 - protein, 62 aa, Homo sapiens
LQQLPQLRGRPDGMHAGQAAGQVLSGPAGAATALAALGLLPAEASPAHPQVPPAAPGNCQAF

SEQ ID NO: 35012 - protein, 44 aa, Homo sapiens
LLPSARPAALLFAVGAAPGAGPRAEPRRLQRRGPARRPGNFAES

SEQ ID NO: 35013 - protein, 25 aa, Homo sapiens
VVTFWLFARLLLCGVFHPRYGGHRG

SEQ ID NO: 35014 - protein, 37 aa, Homo sapiens
MGRAGKQKRIRVLFTLWRVSPRTVAWASPSSFVLCFL

SEQ ID NO: 35015 - protein, 76 aa, Homo sapiens
LLSALLCFSKAFQQQHEVGSLPPPVILIIFSLEVQELQAAGDRLLGTCVELCTGDWDCNPGDHCVSNGCGHECVAG

SEQ ID NO: 35016 - protein, 80 aa, Homo sapiens
LGATARASRCAPRAPGSMELPLRAARPAPRRARSLLCGQVIGLAVLRPQAAAAPQRWSPKSSSSTWEVTSCSPWMALCSP

SEQ ID NO: 35017 - protein, 7 aa, Homo sapiens
VWLWLAA

SEQ ID NO: 35018 - protein, 74 aa, Homo sapiens
LGKGACAGSCVLLVLRIFSKLKAESQGPCVLPWYLLTFRECFPLPSTGTQRLDLLRTSEKDCPYHPHHSKTLEP

SEQ ID NO: 35019 - protein, 48 aa, Homo sapiens
LGKGACAGSCVLLVLRIFSKLKAESQGPCVLPWYLLTFRECFPLPSTG

SEQ ID NO: 35020 - protein, 49 aa, Homo sapiens
LGKGACAGSCVLLVLRIFSKLKAESQGPCVLPWYLLTFRECFPLPSTGS

SEQ ID NO: 35021 - protein, 78 aa, Homo sapiens
MLQTLPAPSSMLCLCSASLMQRRKSGYPLRMMSTLNTPSILWRSTRTLKLLGIVMTPVPCHWMRAPALPTPCAGTIGL

SEQ ID NO: 35022 - protein, 33 aa, Homo sapiens
LKYQALALALALALELRRSLGLSLAARSLDTFS

SEQ ID NO: 35023 - protein, 52 aa, Homo sapiens
MRTMLLVYVMRRFVITIQYYFFVHQRNGVRSWQISLLESFIIYIIKLRVKDW

SEQ ID NO: 35024 - protein, 53 aa, Homo sapiens
LYGWWFLVLWGQVPPAIVQAAVCKPKKHEDTGRLLGDSPAPPHPGAAALRQPD

SEQ ID NO: 35025 - protein, 30 aa, Homo sapiens
LHISTVALMSMLTASMLDRQSFYCWIVQDI

SEQ ID NO: 35026 - protein, 16 aa, Homo sapiens
LELRAKTFLTFLLLNI

SEQ ID NO: 35027 - protein, 57 aa, Homo sapiens
MTGGRSSAGRWTRECENLAALGPFRRGHEAKPSAVAKDKCAFFWAPSAVQPVITPRL

SEQ ID NO: 35028 - protein, 48 aa, Homo sapiens
LRGSGLSGSSSCFLARPMTIFARLHCTFSQVSSLSLMCDTSSWTRYFS

SEQ ID NO: 35029 - protein, 33 aa, Homo sapiens
VRHPPARKGLMRTGATAAIALCSSVSWCTANAK

SEQ ID NO: 35030 - protein, 16 aa, Homo sapiens
LRRKGWLWICCLLRSL

SEQ ID NO: 35031 - protein, 41 aa, Homo sapiens
LSGAVSTGPASGIVLWLPHENPICQFQKQKQKKFGYSGSHL

SEQ ID NO: 35032 - protein, 58 aa, Homo sapiens
LPPTFQYLLICSMNENGKFPGLPSAQLSCLPPFASAAHASLSSVFCAWTLWAHPGHGG

SEQ ID NO: 35033 - protein, 145 aa, Homo sapiens [sequence omitted]

SEQ ID NO: 35034 - protein, 48 aa, Homo sapiens
LRPLSESMSTVKKMRGLLRSRLLSSLLLKAPLRLVSLFWRLCIRKLKI

SEQ ID NO: 35035 - protein, 116 aa, Homo sapiens
LLPSWYPEILVPLVAWLFKPPLLIGGGGLGVIPVGETSPRCLGSGLPAWSPCRVPVCGPRVTSCSFSLGFSPDQAPGFELLSSQLIFFMRERILLLDLFLILFSVTDLFSVSYLWL

SEQ ID NO: 35036 - protein, 33 aa, Homo sapiens
LRVAWDAERDTRARSYVSAAAAAASVAAATSSP

SEQ ID NO: 35037 - protein, 27 aa, Homo sapiens
MSFLIAGFGLFIIMFINTFDSTVRNVG

SEQ ID NO: 35038 - protein, 26 aa, Homo sapiens
MWRLTAIFLFQLILPRCISQKTLIHR

SEQ ID NO: 35039 - protein, 10 aa, Homo sapiens
MIFFGKVFLV

SEQ ID NO: 35040 - protein, 54 aa, Homo sapiens
IHVFYSKVLNMGVSFFYSLSLMTQQKRNCRPWDNQHLNKLYNYFFKLSYRVIRL

SEQ ID NO: 35041 - protein, 32 aa, Homo sapiens
MTVYLLLLSARMMRILTTIILTEAPKMVSWGT

SEQ ID NO: 35042 - protein, 46 aa, Homo sapiens
IDENGKFPGFPSAQLSCLPLLGPAAHSLLSSVFCAWTLWAHPGHGG

SEQ ID NO: 35043 - protein, 25 aa, Homo sapiens
MFVVATLLVTAKMTHQWKQLASLLR

SEQ ID NO: 35044 - protein, 25 aa, Homo sapiens
MFVVATLLVTAKMTHQWKQLASLLR

SEQ ID NO: 35045 - protein, 52 aa, Homo sapiens
LSLEASSEDLVGLSFWVWAISVLMCVLFYHYCIMVFKPVGTQRTSLCNNNEE

SEQ ID NO: 35046 - protein, 26 aa, Homo sapiens
LAFALGWCWKLLVVARSLLHCKGVRI

SEQ ID NO: 35047 - protein, 37 aa, Homo sapiens
VSSSALFLLYFIHNSQRCWTRMGRPPVAMSPPRCSWG

SEQ ID NO: 35048 - protein, 40 aa, Homo sapiens
KHCQKTLSMGLCWMRVLLTQVYTSISGQQKRRMTQAWCIK

SEQ ID NO: 35049 - protein, 46 aa, Homo sapiens
RHSGQCLLHLLGTSGAAAPAPGSERRVPEIPASLRPTVVRGESCKC

SEQ ID NO: 35050 - protein, 79 aa, Homo sapiens
IYAHVGTEESSVVAMFSPQELTGEGMGQDPSLCKASVTVMFQVFLMTVCLYLTVLLTNNLLGSKGQHLLSKAQEEFEEN

SEQ ID NO: 35051 - protein, 37 aa, Homo sapiens
KELVLGAPWFRRQPPASSSFCCCSWGLCLLPTPALCP

SEQ ID NO: 35052 - protein, 16 aa, Homo sapiens
IELPFAFAFFTFAFST

SEQ ID NO: 35053 - protein, 46 aa, Homo sapiens
MRGPASSFYLVALLRARWVTSSCTGATRENSARVLALVVSVQTGTV

SEQ ID NO: 35054 - protein, 41 aa, Homo sapiens
LAPSRDALSFFLLFLLLPLFASPANAVGAARRSGAARDRAT

SEQ ID NO: 35055 - protein, 59 aa, Homo sapiens
KSIFSGRVPGSSSSFLLFLLLLHLRLLGDHCPLSAADTGCSSRLGLFTYAPHRSLGRPT

SEQ ID NO: 35056 - protein, 15 aa, Homo sapiens
LAGVAGGVRGPSPMA

SEQ ID NO: 35057 - protein, 39 aa, Homo sapiens
VCMEGLAWVSMEGLAWVCMEGLAWVSMEGLAWVCTEGLV

SEQ ID NO: 35058 - protein, 56 aa, Homo sapiens
IPRHMPAAYSRFLSWCLLALGEEAKLWLPASRAKRVRPWIETVTSIGNAERGTTWL

SEQ ID NO: 35059 - protein, 52 aa, Homo sapiens
KDTSPMEMVCRNGRMAGVNCGETRLRHPPLKRGMGTGQERGTGMCGEDTFIQ

SEQ ID NO: 35060 - protein, 41 aa, Homo sapiens
LLIAWVVVGVSLQRRILTVKKQSGSRGPPLIPQGPDGGQRG

SEQ ID NO: 35061 - protein, 50 aa, Homo sapiens
MCQWGSLSPGPKKQGTKFKTLASSQPLKPWPPEFPFLSLSFYFFYFYFYF

SEQ ID NO: 35062 - protein, 38 aa, Homo sapiens
RPHQRTNADNSSWSFALKTRSWGHSEGDMRSRRCCFVR

SEQ ID NO: 35063 - protein, 33 aa, Homo sapiens
MHVSHTLATLAASALQSPSPRPLVGSLVHTGGK

SEQ ID NO: 35064 - protein, 71 aa, Homo sapiens [sequence omitted]

SEQ ID NO: 35065 - protein, 8 aa, Homo sapiens
MELKGKRK

SEQ ID NO: 35066 - protein, 175 aa, Homo sapiens
MSAGQRRAGNPEPTLETSSIPQSTGAAHPAERTSLPTTEALPPPARPPVTGGQSNVTSRDPDWEAPFDQCACALGLCPPQEERSRELRRWWLGHQREAGVAQAAGAGTDLERRKRGRKVVLSGWGLPGIRRPAVEPQGSTGQICLPCCLSYAESLAQGGGFSYWPRYLNGMEDRS

SEQ ID NO: 35067 - protein, 34 aa, Homo sapiens
MLDNRQKVETQRTCDMTDIRSFSWPQMSNNILPE

SEQ ID NO: 35068 - protein, 140 aa, Homo sapiens
MVLLVLLVLLASLVPEAPLDPRAPAALLVPRVTAVNLVLLAAKETLVLRESLALLVFKDPLALLERKESEELEVNPDPLACPDPLASVVDLVAVVSLAQMVLLVPRVPLVNVVLLALLAPKDLLVKLVVPVKLVCLVPRV

SEQ ID NO: 35069 - protein, 94 aa, Homo sapiens
MLPTLTAPTLALLLLPKISCLLTSTHPRTQGSRAHFPRAWRLDPGEFLHPLQDPHSSPLWSLDHRWRWPELTCWLWGHSSCWPRMRRGTREYKG

SEQ ID NO: 35070 - protein, 71 aa, Homo sapiens
MRSSTSCSSWTPASPPTTRSWVTSTTIMAAAAAVGAAGPQPQPQPLRAPVRSCCGSWSSGCRSPAPCAWPG

SEQ ID NO: 35071 - protein, 46 aa, Homo sapiens
MLTLSLQPWSPLSLAVLPACLETFNLYPSPLSPEASSSGVWLPLGG

SEQ ID NO: 35072 - protein, 61 aa, Homo sapiens
MGTSCPEERIFKEKGSSTSSTQPRNRGRTSQARSGAPVCVPARDKRERHNWLQPFSCLFLL

SEQ ID NO: 35073 - protein, 45 aa, Homo sapiens
MTLLLLLKSPYLAFLKFQGSLCATYHSPLTLVPSGPIVDGCMGAM

SEQ ID NO: 35074 - protein, 27 aa, Homo sapiens
MVTPSWRGWPKPRSLAWWGRGLSHSLA

SEQ ID NO: 35075 - protein, 38 aa, Homo sapiens
MAALILDLQNHEICGYGHDLDFGDGFTVTHAFKISGSK

SEQ ID NO: 35076 - protein, 38 aa, Homo sapiens
MELASWKSGKGKANMSAFGLRGQKGWEIRPRRNLLTHR

SEQ ID NO: 35077 - protein, 70 aa, Homo sapiens
KPTGAGPPLTRRLRLPPPGLWAQRAQMPGRTPPPAAGTPIAALEPLGRRNWGLHRHLLLPSPRSLPHLLI

SEQ ID NO: 35078 - protein, 62 aa, Homo sapiens
LKDQEIKQWCKSGKNSAFSSTSGRASTVLSQRLSLLPAARLSARRPRLVGWETAVAKGAGNL

SEQ ID NO: 35079 - protein, 51 aa, Homo sapiens
LGVPLGLVWGRSASLVVLAVTGSSSSKDKGPDSRSSTLATPLLPLLAPDGQ

SEQ ID NO: 35080 - protein, 49 aa, Homo sapiens
VPASVTRGGLQGRTATALKENLLGTRAAVGSEGYRLMCVLNSGGGSDGR

SEQ ID NO: 35081 - protein, 15 aa, Homo sapiens
LVSASGVHTWGSNLG

SEQ ID NO: 35082 - protein, 97 aa, Homo sapiens
RTFYVALLLWPMCCILCPQCATGPQRNVCLSNHGSGAVWQECKSGWRPGSPPGALHPPSRRTQQHDALRRSHCVQAPHLPGTALLRVPPSRNEGVHP

SEQ ID NO: 35083 - protein, 53 aa, Homo sapiens
KFEINSKLPATLSLPLMCTPCKQAAAEHSRDALECENAKPQTENIQMLGSPYR

SEQ ID NO: 35084 - protein, 74 aa, Homo sapiens
RKPKPSPGPSLRGPIRPVHPGPRSPGRGAQSCAHEPCAGRAWAWRRRVPGLRRLCGGSSLLAVGSLAGAARPGP

SEQ ID NO: 35085 - protein, 35 aa, Homo sapiens [sequence omitted]

SEQ ID NO: 35086 - protein, 16 aa, Homo sapiens
MNFYITVHVLCFAVIP

SEQ ID NO: 35087 - protein, 11 aa, Homo sapiens
MKCGVCWVGAD

SEQ ID NO: 35088 - protein, 12 aa, Homo sapiens
VGPISLFSALLA

SEQ ID NO: 35089 - protein, 31 aa, Homo sapiens
MRELLLCLLMEVFTAQGFLILIQEIRSWYGD

SEQ ID NO: 35090 - protein, 36 aa, Homo sapiens
LGVASSCQIPCSPGDPEKHRAIPDPGTFRRLAAIWE

SEQ ID NO: 35091 - protein, 97 aa, Homo sapiens
ISTSLHFSFLWGAALVLFGPCLLGMEQSIEQTTEILLCLSPVEVASLKEGINFFRNKSTGKDYVLYKNKSRLRACKNMCKHQGGLFIKDIEDLAGSC

SEQ ID NO: 35092 - protein, 49 aa, Homo sapiens
VAVAVALVAAAAAAAAALERFLSGSAGGPPGWSTCKSRSGAPGIDGDEL

SEQ ID NO: 35093 - protein, 23 aa, Homo sapiens
LPVLLLPALLPSLRRRAQQGPDA

SEQ ID NO: 35094 - protein, 11 aa, Homo sapiens
LQAIWHMKVLT

SEQ ID NO: 35095 - protein, 23 aa, Homo sapiens
MVSIHILLLPALLKSCSHLSASQ

SEQ ID NO: 35096 - protein, 7 aa, Homo sapiens
MVLYIFI

SEQ ID NO: 35097 - protein, 33 aa, Homo sapiens
MRRIHLGLAFALGWCWKLLVVARSLLHCKGVRI

SEQ ID NO: 35098 - protein, 27 aa, Homo sapiens
KMAAVSVWGISAVRPGAPGSRLSFLPA

SEQ ID NO: 35099 - protein, 40 aa, Homo sapiens
MLYQQIVVFLLLTLVYFCLIYISLLSNFSCTSSSNFKNIT

SEQ ID NO: 35100 - protein, 25 aa, Homo sapiens
LLLACEDPLWDMDQKCCSSRYLPPV

SEQ ID NO: 35101 - protein, 12 aa, Homo sapiens
MKVLIAWGVLIT

SEQ ID NO: 35102 - protein, 71 aa, Homo sapiens
KRPLLSSAILTFLTYLMKMSFERCTARNKMFVNSPFTKVDNYCTFLMEKVLFKVLFLIEYYQKGKKNDLNF

SEQ ID NO: 35103 - protein, 32 aa, Homo sapiens
LELSWGSLFAAAAAAATAVLGARSPGKKPSHV

SEQ ID NO: 35104 - protein, 37 aa, Homo sapiens
ILEVFSCGRSAPLLLLSPLSPTPSGLILFKIFSPILR

SEQ ID NO: 35105 - protein, 26 aa, Homo sapiens
MLHFFHDSGWFFLYLECFSSVVPLPL

SEQ ID NO: 35106 - protein, 10 aa, Homo sapiens
MMITLLMFLL

SEQ ID NO: 35107 - protein, 10 aa, Homo sapiens
IMPNKRFYTF

SEQ ID NO: 35108 - protein, 21 aa, Homo sapiens
MASRVLPFPLILFFRFQTTVL

SEQ ID NO: 35109 - protein, 26 aa, Homo sapiens
MKNCGTDLRCSLVGNWHANHNHDGGF

SEQ ID NO: 35110 - protein, 41 aa, Homo sapiens
LAAWFVQRVAVMALVSGLHGVHLESGARLCVQFGSVTKRCN

SEQ ID NO: 35111 - protein, 39 aa, Homo sapiens
MNPPERKNCQHSRTSEGTNWGHAAFKKHNRHREGPRLHS

SEQ ID NO: 35112 - protein, 52 aa, Homo sapiens
MPAAYSRFLSWCLLALGEEAKLWLPASRAKRVRPWIETVTSIGNAERGTTWL

SEQ ID NO: 35113 - protein, 7 aa, Homo sapiens
MKTLRPP

SEQ ID NO: 35114 - protein, 28 aa, Homo sapiens
KVLHMIRKQLWKMTAFISLNILPYGTDQ

SEQ ID NO: 35115 - protein, 16 aa, Homo sapiens
IHKILVCIFLNTVHVP

SEQ ID NO: 35116 - protein, 46 aa, Homo sapiens
TPNFECFFVTHPHMSQLERILGWSYCMLIVLFFLLAVHFGGYYKEI

SEQ ID NO: 35117 - protein, 41 aa, Homo sapiens
LLIFFSWCVWWLFLSVEGKRRYHPRLSPTPLQNGFSDTPAV

SEQ ID NO: 35118 - protein, 9 aa, Homo sapiens
MVNLLFFLS

SEQ ID NO: 35119 - protein, 52 aa, Homo sapiens
ISLLPLGQACFTAGPASGASTDRGSEASQAPTRSPNAHALRSAPGGGRRSRR

SEQ ID NO: 35120 - protein, 42 aa, Homo sapiens
RRSKQPLEDQHSRDYGGPSVFSVTGAMLTSVSWTHSDSGAFT

SEQ ID NO: 35121 - protein, 37 aa, Homo sapiens
MTLSLCWASPCCWEPPGPWPSFLLASSCCPSCSSSPS

SEQ ID NO: 35122 - protein, 36 aa, Homo sapiens
RFLTWVHWMTLRFGVLLIPSCRLHCCDPSSSPKDAS

SEQ ID NO: 35123 - protein, 39 aa, Homo sapiens
VCKALFVAERLELQQRYEQVSRGHRRKSSYSSGRLEKIL

SEQ ID NO: 35124 - protein, 53 aa, Homo sapiens
RVRNESVSKRQNPGLLTSQWGMLFTLQLTLGLPGALSLGCLMRDVQGFSWVGV

SEQ ID NO: 35125 - protein, 84 aa, Homo sapiens
RECSSDAVTWAGALGLASALVAARPALWSHGLPGRTPRLSPSRPQPPDDPLLPSLSPTVGLAEDGARPGPRGAAQVLGGREPGA

SEQ ID NO: 35126 - protein, 36 aa, Homo sapiens
MNLTGLSSALCGHSSATQSPREVQSPAAPRAPGPSQ

SEQ ID NO: 35127 - protein, 30 aa, Homo sapiens
ILGTNMLLFPLFLLLSLDLCQKEGYAESLI

SEQ ID NO: 35128 - protein, 81 aa, Homo sapiens
LVPSSSTPFSLGPMGTCTAWCEAATVSLSLRLPCSSARWPPPWRTVTSTVWSCVISSCVALSSLTVRGRSWCWRTWRTPAC

SEQ ID NO: 35129 - protein, 29 aa, Homo sapiens
VGQTRSTEDGAGRPGHQQDPRPGARGPED

SEQ ID NO: 35130 - protein, 9 aa, Homo sapiens
IFLFLILEM

SEQ ID NO: 35131 - protein, 75 aa, Homo sapiens
MRPIQQHTGRTAFTGQDPLHIGIFLIEIYRAQEYLHLEKSLGSSYPSTGCIPISGPSLAARQISLFNSKRILCKQ

SEQ ID NO: 35132 - protein, 41 aa, Homo sapiens
MLPTLTAPTLALLLLPKISCLLTSTHPRTQGSRAHFPRAWR

SEQ ID NO: 35133 - protein, 9 aa, Homo sapiens
LPTLLLLGF

SEQ ID NO: 35134 - protein, 34 aa, Homo sapiens
LAIFSHSIAFAVFYLDQYLISFSFSSLLWGSRSG

SEQ ID NO: 35135 - protein, 23 aa, Homo sapiens
KRNFKARRSCLLVIMLLTRTETV

SEQ ID NO: 35136 - protein, 40 aa, Homo sapiens
RIKRWSSELPWRHFFTLLWGFWFHVWRNPSSARQKYSKRK

SEQ ID NO: 35137 - protein, 38 aa, Homo sapiens
LCDTKISNSCLLVLSLKKILQSLLILFLGVTIFEAKLT

SEQ ID NO: 35138 - protein, 50 aa, Homo sapiens
KDIGGGLALKLLFKTRKRRRKRKKRKMLGNIYLTCSTARTLASCCYSCKY

SEQ ID NO: 35139 - protein, 52 aa, Homo sapiens
TFYCSLFPRVTPRLVVSSSALFLLYFIHNSQRCWTRMGRPPVAMSPPRCSWG

SEQ ID NO: 35140 - protein, 11 aa, Homo sapiens
IIILSLAIVCP

SEQ ID NO: 35141 - protein, 31 aa, Homo sapiens
LRAVALAAATGSGGDRLCSRLGLLLLLRGHP

SEQ ID NO: 35142 - protein, 80 aa, Homo sapiens
VHSTRVLNLRRFLRGAAWMLLSPTRCISCCHQESSLASQGLRKYHQSDSTVLCPLRGRRKRMPCRTAHSVPLCSRTPSIM

SEQ ID NO: 35143 - protein, 44 aa, Homo sapiens [sequence omitted]

SEQ ID NO: 35144 - protein, 116 aa, Homo sapiens
MSGLTLSVLDFKSIVLGEEDKVSGLSNSPESQSQSRSWTQIVQSSCSYTLHFAILNKKTKTPGGLQLRPRCRDLPTATLLANDPVNSTSSSSTSRACVCMSSFWSFLSWYSLCFNF

SEQ ID NO: 35145 - protein, 50 aa, Homo sapiens
MPSQKLPLLNHQISLRTPSLSREPHEGNHPHDLITSHQVLPSTCGDYNSR

SEQ ID NO: 35146 - protein, 15 aa, Homo sapiens
MGLLLLRLTKQLMLL

SEQ ID NO: 35147 - protein, 34 aa, Homo sapiens
MRNKREGAFPCAALGETHTDRGSGMTGKGGNGFC

SEQ ID NO: 35148 - protein, 15 aa, Homo sapiens
VQERWGLLIILFCLF

SEQ ID NO: 35149 - protein, 33 aa, Homo sapiens
MVPDFSLLFSVSATTVLAQALHISHMNACRTVP

SEQ ID NO: 35150 - protein, 50 aa, Homo sapiens
LLSHRVSIKRKIMQSCKMLISFLLLSFLTASRLTGYSKPSGAYLLFFSTS

SEQ ID NO: 35151 - protein, 46 aa, Homo sapiens
LRRYRKGRSRCFLGSQSFTETLAIPFGMFTGTPVLSCLSYASSTPY

SEQ ID NO: 35152 - protein, 58 aa, Homo sapiens
LKPFLALCLSATSLGANGHELRLSKVSSTLGLRSPWQSPRCLRYHGRNDHPGSGRSHG

SEQ ID NO: 35153 - protein, 38 aa, Homo sapiens
VVALIFFLHASCPGSLSQACLHQVEANCPACLKNMCFL

SEQ ID NO: 35154 - protein, 11 aa, Homo sapiens
LLFQPGLCDFG

SEQ ID NO: 35155 - protein, 55 aa, Homo sapiens
LSHSLKDSPHLGLLFFFFFLIIIIFFFFFTDLSDVCVQSAVGRLMGPESVVTDNL

SEQ ID NO: 35156 - protein, 55 aa, Homo sapiens
LPACPPPGAACFQTLNWRLCWVSPFQHPAVVWLVPGGAGLLFFGDTLVGVGCLSP

SEQ ID NO: 35157 - protein, 71 aa, Homo sapiens
VCAASVSCTRFLYSIFLAVVASLFAEGWEPPSVSGTCPSVTSSKCALCLVSGLALPTSMSLVAQGAPGLPS

SEQ ID NO: 35158 - protein, 47 aa, Homo sapiens
LAVIQIAFATNLKTYRGRRTGIILFVSCFETSICKGFELIFIIHMRK

SEQ ID NO: 35159 - protein, 32 aa, Homo sapiens
LHMVLLTFWKVSLSSSGRISISLSNSHLPFSP

SEQ ID NO: 35160 - protein, 17 aa, Homo sapiens
LLISFVTFGLLLLPHTH

SEQ ID NO: 35161 - protein, 35 aa, Homo sapiens
MLWRTEGFHRVQRTLTSRPLSLLGHVVVLLLRVCR

SEQ ID NO: 35162 - protein, 44 aa, Homo sapiens
MRPVVLLSVSLRRTEAHLPPCLLRPGLVTASAEEITTALELLVC

SEQ ID NO: 35163 - protein, 11 aa, Homo sapiens
VLALSWLLHVG

SEQ ID NO: 35164 - protein, 14 aa, Homo sapiens
LKQLGYVCLLYFLF

SEQ ID NO: 35165 - protein, 29 aa, Homo sapiens
MEKTRALSSWHHLSFLLIASFSSELHLAN

SEQ ID NO: 35166 - protein, 15 aa, Homo sapiens
LGVCMALHVCVFVSV

SEQ ID NO: 35167 - protein, 65 aa, Homo sapiens
LHALLFSWKALPEDLNALDSGQRPFKWITKSRLHQAERPLTSSVMLPFTMCLLGIRSVARHPSCF

SEQ ID NO: 35168 - protein, 24 aa, Homo sapiens
LQRMHTSGRGWGTTCLLVLLASDE

SEQ ID NO: 35169 - protein, 21 aa, Homo sapiens
LNTKEHTLYVHLILEPKSCLQ

SEQ ID NO: 35170 - protein, 39 aa, Homo sapiens
LRAGKHSAAHPLKIVYLPLLLLSYNAWKQEMGSAAANRT

SEQ ID NO: 35171 - protein, 38 aa, Homo sapiens
LAGKHSAAHPLKIVYLPLLLLSYNAWKQEMGSAAANRT

SEQ ID NO: 35172 - protein, 58 aa, Homo sapiens
VNFVSTLSRGKFGLSPGVHTAAATQCATYHFFLFCFVLFLKDHFILKRKADPSKHESI

SEQ ID NO: 35173 - protein, 20 aa, Homo sapiens
MGKRVWLWMVISCWQVVKLI

SEQ ID NO: 35174 - protein, 59 aa, Homo sapiens
VRCKERNRGAIFVSQGRAPARTREDQLRMARSRKAKEETQAVLTKSLSNIGRKFQFRDV

SEQ ID NO: 35175 - protein, 44 aa, Homo sapiens
LVPKEDDSTSFSFLPSLPCPALLPLLAVVVCQHLAGDFLNLQGE

SEQ ID NO: 35176 - protein, 14 aa, Homo sapiens
MFPRHSVLAFTSVL

SEQ ID NO: 35177 - protein, 68 aa, Homo sapiens
MTLLNWKLRLPLGHFGLLMPGSTGQGGSYSVGCMADLTTKGKLDYCSTMEILSGLFHGSGTTSSFPTS

SEQ ID NO: 35178 - protein, 35 aa, Homo sapiens
MLQRASEVSRKERPSDSKQLCNWSLLRMTPSAWDP

SEQ ID NO: 35179 - protein, 12 aa, Homo sapiens
MQGIFGSLTDLT

SEQ ID NO: 35180 - protein, 40 aa, Homo sapiens
KGHRPSGLLSTACLCLATQCSAGSSAMCSTNSSEMDTRTS

SEQ ID NO: 35181 - protein, 9 aa, Homo sapiens
MKTYFMFLI

SEQ ID NO: 35182 - protein, 29 aa, Homo sapiens
LNIKRVIVELPVICIFFSFLILTLFKKCR

SEQ ID NO: 35183 - protein, 54 aa, Homo sapiens [sequence omitted]

SEQ ID NO: 35184 - protein, 33 aa, Homo sapiens
LQALGCSAGVLLCLPGWCAVVRPRLTAASATQM

SEQ ID NO: 35185 - protein, 39 aa, Homo sapiens
LAKNSPHQCRLPIRKWWLVWLMPWPTSITKLAFLLSNFY

SEQ ID NO: 35186 - protein, 8 aa, Homo sapiens
LGFLLVAA

SEQ ID NO: 35187 - protein, 34 aa, Homo sapiens
IWKAWAVLGLGTGGYGLIDDSEGEKTPWVPSQKE

SEQ ID NO: 35188 - protein, 16 aa, Homo sapiens
VDLLKVMIFFGKVFLV

SEQ ID NO: 35189 - protein, 22 aa, Homo sapiens
VLANTSVITIIAMIIVLITLTR

SEQ ID NO: 35190 - protein, 67 aa, Homo sapiens
MTPMPTAMVQVAMSPTGMSLEAHLSGAHTAPPQATARTQPCWRPLRAARAQTLRAHPHPAVPLPTAS

SEQ ID NO: 35191 - protein, 41 aa, Homo sapiens
VARVSSALRSRPLALLPSAPASLRVSRSSSSPTRPVPHGSG

SEQ ID NO: 35192 - protein, 35 aa, Homo sapiens
LAVYMGLHFNYGLQKSLPVNSLHPHLPTPTLGNGL

SEQ ID NO: 35193 - protein, 37 aa, Homo sapiens
VDPGPVVLGLSLWVLAGGMGEGGEQLPAPLLCGSSFF

SEQ ID NO: 35194 - protein, 90 aa, Homo sapiens
KMKLGGHSWICLLHFQLCSTSQRFLKNEDISALSSGGEVCLASASTLLLFTRCMHALSESGLCFPSRRDHPPRLAWDIFTSRHCIFLFAI

SEQ ID NO: 35195 - protein, 20 aa, Homo sapiens
KAMTLHQIAPGHFPQSFQQI

SEQ ID NO: 35196 - protein, 27 aa, Homo sapiens
TCGFYLLAILLCGRVVLTLHPRGPFLA

SEQ ID NO: 35197 - protein, 13 aa, Homo sapiens
MESRSHSITTYTT

SEQ ID NO: 35198 - protein, 31 aa, Homo sapiens
IPLSYSLFHPLLFLHSLLFFSSFFTQPFSFM

SEQ ID NO: 35199 - protein, 22 aa, Homo sapiens
IVQFLLLVGFLSCVSLVFVKFN

SEQ ID NO: 35200 - protein, 17 aa, Homo sapiens
IFSALFMCGFLSPLPWS

SEQ ID NO: 35201 - protein, 74 aa, Homo sapiens
LRRSGDPTPHQEFQCCMRLSTHVHAATSPSPHTSGCLFVLFVPELLLSGLFRFYPSFSLRVREEGSQDWGPDGE

SEQ ID NO: 35202 - protein, 41 aa, Homo sapiens
LLRNGARNAFLCVSCLFVFQLREESIRQMECTCEDEETENK

SEQ ID NO: 35203 - protein, 14 aa, Homo sapiens
LSDFNLLMALAVLF

SEQ ID NO: 35204 - protein, 57 aa, Homo sapiens
MKSRSCQWFIPRRMHNVQSCMCMMSSMVLSYFKFLVHLHKSFLTSIFLTNFMHSVCL

SEQ ID NO: 35205 - protein, 163 aa, Homo sapiens
LRELPPGGREVQLLLGLCSPPRVSLASFPKAAQSWYEVRVGGSRPAWLLTATPGLVSRSLASITHPHQKLAAAATARAGGSSPRLDLQNLSFASKPSFQLGEGEEGAVAAVLLALSPFLSFSFCVQVTLHGILFFWDFVIFSNMSWDLRSCNGDAKDTVSGLS

SEQ ID NO: 35206 - protein, 38 aa, Homo sapiens
MRSQSSFFCFSPTSSRTQHAALPPQPQCAFLRALRRAP

SEQ ID NO: 35207 - protein, 66 aa, Homo sapiens
LTRLLLHVIYFSSFPPVETLLLERELQHGTETGRKKQRGLGDAPTEQPLAHSSSRGHEHQAGGQER

SEQ ID NO: 35208 - protein, 83 aa, Homo sapiens
LLCLLSATALLCSLGHPRPHLLRLPDLPSFPAFLWIPASGHPSPPSLQGPLLVSLLLEPLPPPPSLQNFSFTPHPPPLPPFLF

SEQ ID NO: 35209 - protein, 72 aa, Homo sapiens
LHGPSNAVTQGLVISVSSHPFFPRDTEEWLVFLDSSSATKLGLTALLGFLCVLCVSFILKEVILNVTLKRYM

SEQ ID NO: 35210 - protein, 16 aa, Homo sapiens
MHYLLFLMIFSLFHHD

SEQ ID NO: 35211 - protein, 20 aa, Homo sapiens
VVADLGLVGILLLLGGSRSP

SEQ ID NO: 35212 - protein, 54 aa, Homo sapiens
LDSKMMATLAPILWAPGFAHQISSPLALHLLLYLQGLPDSHLPIIMDTAPGCAG

SEQ ID NO: 35213 - protein, 49 aa, Homo sapiens
LMKTWTIEWSRNSPLSLTITVAFLWSSSSPRIPKTAAEFIKIKFVNVTT

SEQ ID NO: 35214 - protein, 24 aa, Homo sapiens
LWFLVLMRPLLRICAYLVPLLSTS

SEQ ID NO: 35215 - protein, 71 aa, Homo sapiens
MSSLFLSPPNQSYTARFLKQSQLQSLISPLLLLLLSSLLLICIFSLVKLPSLCSLFSVFSLERYSCKSELI

SEQ ID NO: 35216 - protein, 111 aa, Homo sapiens
LGTVPERENLFSDPGSSRPLEICSWVILLLKRTTPAPRTPAAPPHGEMVSVKGRLDDEFMKLFLARAGHDLAESPEDETPALPGAHLLIRRTTNHLTSLDFASPLFSEGLD

SEQ ID NO: 35217 - protein, 53 aa, Homo sapiens
LNTLVLSFIHGGSPPPTWGAEGNLPSQFTYQKFLCRNMIVPSVGHHLWSSLSF

SEQ ID NO: 35218 - protein, 65 aa, Homo sapiens
LSCLLGPLSLCGVYICFHKSVLFFSLFCLCISSNCLFKMPRIWTPSTSNRHWEGEGRKAECKMKW

SEQ ID NO: 35219 - protein, 37 aa, Homo sapiens
MHFLLSVTCGQLATSTVLDTFKLPRGEDRKLGHPVWD

SEQ ID NO: 35220 - protein, 46 aa, Homo sapiens
LAQHNQCSPMLQKTDCSLSLPTVFLVYLLPLFNSGKKFLLDLSNPF

SEQ ID NO: 35221 - protein, 16 aa, Homo sapiens
LIIFWHFILILGVKMV

SEQ ID NO: 35222 - protein, 47 aa, Homo sapiens
LMVFFLINSWCFFLGPFGLMLLSKFFLKKPHLVQKSVKLDSLNSVAV

SEQ ID NO: 35223 - protein, 142 aa, Homo sapiens
MAAAASPRRDPAGRRVSRPKPAGPRRNPRRVAGTQRLWAAPGVVGRKVWRPLERRAAEAIKAWRAREGGLGTQAGSATSLGHGAAQIRFPGDHSVAIGRDRPSPDDNGQRPSGAWKVIKMEHNCYQKRTAPLQWSSEEAFYI

SEQ ID NO: 35224 - protein, 168 aa, Homo sapiens
LTFSSSLPLQTLLPLCESQPCMPTPVEPGDRSCEPLALSWTGWACDAISPVSSPPPKGLPSWGGGTVGPVLSCFYRKSCSRECEVVQVGAEALMASCFLPTTWPVPTQPLRWHIWRAGVEGPPPHMPFWGEALWLPHSPWMGVAPLSPNHSIHPIQETNMVAILHKKR

SEQ ID NO: 35225 - protein, 41 aa, Homo sapiens
VEALWCPLLPGALPASLPITMPQPQPGPLQCLGLFQSSRAI

SEQ ID NO: 35226 - protein, 67 aa, Homo sapiens
LDFTLHFSLELFLVINFLGGTGTRGPAARPRIAAAGQRGLGRAPRRSGAAQAERTLKVFSKLFEESD

SEQ ID NO: 35227 - protein, 48 aa, Homo sapiens
LKSNLKIMDNLRPIYAESAIPVLFALMLCCYHLRFFFFGNYFEWQNKE

SEQ ID NO: 35228 - protein, 41 aa, Homo sapiens
LGPSMTFSWIPHLPSVTCVSISFSSGIFFLQDSYLRYPVST

SEQ ID NO: 35229 - protein, 46 aa, Homo sapiens
MVTMSPGPSMTFSWIPHLPSVTCVSISFSSGIFFLQDSYLRYPVST

SEQ ID NO: 35230 - protein, 49 aa, Homo sapiens
MVTMSPGPSMTFSWIPHLPSVTCVSISFSSGIFFLQDSYLRNRWTWPGR

SEQ ID NO: 35231 - protein, 35 aa, Homo sapiens
MTLFIASPNSVLTTVLLQMGQQVRGSQADFQHHRE

SEQ ID NO: 35232 - protein, 68 aa, Homo sapiens
LALLLASSVLWQVTSSPQVSRFPHLLPLQTSARTLHATVSGTELTGSRGCSTSGNLLQHFTDCKRGTC

SEQ ID NO: 35233 - protein, 27 aa, Homo sapiens
LPAFFCFKILSMTSLFRPASTIQLPTI

SEQ ID NO: 35234 - protein, 24 aa, Homo sapiens
LLWRQMNWILIVTLLFSPCVTLEP

SEQ ID NO: 35235 - protein, 37 aa, Homo sapiens
VVVVVFLVVRGLRPGLKWKRRHHDRTAEPRTLTVSAG

SEQ ID NO: 35236 - protein, 86 aa, Homo sapiens
MLALKEWSFALGHHCVVLGILSSVNQKSKISHWSKVKVSFGLVASRGSAGRLFFLSFSAFRSCLHSLAPSSHHSNQLPSLQSITFL

SEQ ID NO: 35237 - protein, 51 aa, Homo sapiens
LLKNTQICLELFPEHRTKRQESKVVMSLVICLLLKVTSRASSWHCFWNTVT

SEQ ID NO: 35238 - protein, 40 aa, Homo sapiens [sequence omitted]

SEQ ID NO: 35239 - protein, 13 aa, Homo sapiens
LLWFLWTGLLTLP

SEQ ID NO: 35240 - protein, 57 aa, Homo sapiens
MHMWLWSFCGGNLLQFRLSGQANPNSFRTGSQRLLTERHMPPHGPMGMLIFSVHIGT

SEQ ID NO: 35241 - protein, 47 aa, Homo sapiens
LFLQKKMAEFRLDRGEMLRVRLGVVICCLPPVICANSQATNNFSYAL

SEQ ID NO: 35242 - protein, 62 aa, Homo sapiens [sequence omitted]

SEQ ID NO: 35243 - protein, 33 aa, Homo sapiens
LPLKTNRTKTKHQGHISLSFLISVLYIEGVHIC

SEQ ID NO: 35244 - protein, 30 aa, Homo sapiens
MTSHWPAQTCLCLSFLSSKLHKTAYIRGWL

SEQ ID NO: 35245 - protein, 35 aa, Homo sapiens
MTSHWPAQTCLCLSFLSSVSTGYVSHCQIPDHKSP

SEQ ID NO: 35246 - protein, 75 aa, Homo sapiens
VSPTLSPLTPFLHLMMQLTLASPLQPAVLPTSRDVCVCVCVCDCVCLLTVVFVATCLWMVLCLLVNCGLAFPGRG

SEQ ID NO: 35247 - protein, 60 aa, Homo sapiens
MVRLRDAALPCPALSAPAPLKFSIQWRALAGWPSGRAVPGCSLTLANLDLRLTCCGSGRG

SEQ ID NO: 35248 - protein, 32 aa, Homo sapiens
IFSHSIAFAVFYLDQYLISFSFSSLLWGSRSG

SEQ ID NO: 35249 - protein, 102 aa, Homo sapiens
LLTSVLFGRAPSTHLWIHLGALGTMGWWNGCSEILEEWCPHFADTPATLTALPIVLPTYLLPQSLAGEGRWPGAISLQRRGSCFDYHLHLTGQALTLPFIQV

SEQ ID NO: 35250 - protein, 35 aa, Homo sapiens
RSSLIVPGAVTTVGPSAQSAQPLSVLPNPHNRPRL

SEQ ID NO: 35251 - protein, 23 aa, Homo sapiens
ILRTGIFVSALLMYPQQPELPDI

SEQ ID NO: 35252 - protein, 65 aa, Homo sapiens
IEKMEQDAHYCLVLLPLSRLAVGLMPVRRSRLAAKLSWSQAVTLDLGSHWPSICIQKASLCLLAA

SEQ ID NO: 35253 - protein, 9 aa, Homo sapiens
LLFLYFVLF

SEQ ID NO: 35254 - protein, 80 aa, Homo sapiens
VCVSARAPGRGIWARGPRCDSPRLRSALHCGVPALAGKNFILGKLLFLFPSSSAPIFCSSSFSSRLNEPREEKPKRKGRK

SEQ ID NO: 35255 - protein, 45 aa, Homo sapiens
KGLQGDGLGGRRFLFLLPFCLCSPNVPVSPLPHLGPLFGPCGQSC

SEQ ID NO: 35256 - protein, 34 aa, Homo sapiens
LCILKARRRGEQNQLDPSITVGGFNFSFFLVIFF

SEQ ID NO: 35257 - protein, 49 aa, Homo sapiens
VFPALAAGASQESGRWALVLSVASEAGAAVAAPFWCSDTAEEPGPGTAG

SEQ ID NO: 35258 - protein, 91 aa, Homo sapiens
KTSLCFILFDFSSLWVIAPSLFNGSLPASILVLWERPAFWCCSQEWSLTALWKPHRRKTLICPRSCLTPPLDRPSPRFYTVLPARRHDEAM

SEQ ID NO: 35259 - protein, 43 aa, Homo sapiens
KWYKILLIYFLIMLISNEDSCLKIFFNLMVSIFCKNHVNLFHS

SEQ ID NO: 35260 - protein, 37 aa, Homo sapiens
KFFLLASGCLCGFILLGGCSAEELTAERVWKPPTVAA

SEQ ID NO: 35261 - protein, 34 aa, Homo sapiens
LYIATSLWRGHLGSPPLVLLPVCVLVLRMRTVCL

SEQ ID NO: 35262 - protein, 23 aa, Homo sapiens
LAVSVACVALAPRSSISGADVWA

SEQ ID NO: 35263 - protein, 53 aa, Homo sapiens
IFLKKPASPRKATAVFFFFASFSYFRSRGFSCFSSLFFLFANKTKNSIEERAK

SEQ ID NO: 35264 - protein, 12 aa, Homo sapiens
LITLIFIKHVFI

SEQ ID NO: 35265 - protein, 101 aa, Homo sapiens
TDICFLKIFFFWPIGASDTCFFFFYFSLPIGASDTCFNFCFSGPSGPRIPALIFFFHRPSVLFMDEKMLVLWVVALSGISTLFFAADHLVVCECTYRFGRE

SEQ ID NO: 35266 - protein, 9 aa, Homo sapiens
LLAAVFAVF

SEQ ID NO: 35267 - protein, 43 aa, Homo sapiens
LLYSALSARAAAASASALRCAPGPCCHGLPPAKPAEASEPLRR

SEQ ID NO: 35268 - protein, 40 aa, Homo sapiens
LFFYCCAAYFFSLFFCSSFITFKSLDPGALLMYHPMESLF

SEQ ID NO: 35269 - protein, 58 aa, Homo sapiens
TASTVRSPAEPGPGGESCLHGRAPRPHRRSRHHLSPSLVPAMGFVSSSALVTDLDTEY

SEQ ID NO: 35270 - protein, 6 aa, Homo sapiens
LFGILL

SEQ ID NO: 35271 - protein, 42 aa, Homo sapiens
VRELRGPGIVFKVVLLPTCPVVPAPVLTATLPFFHPRVGSTK

SEQ ID NO: 35272 - protein, 70 aa, Homo sapiens
KTKMTERTLAKIFQLHCLTLFYFSDTSPTLIEPVACNLVSQLCLFFLMYLFQTFLPLSTCIIRLEMGMRV

SEQ ID NO: 35273 - protein, 10 aa, Homo sapiens
LLYFVNIFFF

SEQ ID NO: 35274 - protein, 8 aa, Homo sapiens
ILFLVGLT

SEQ ID NO: 35275 - protein, 50 aa, Homo sapiens
MKMCVSLSAQCPERQSAAVWASSPSSSPWAATASSSSSPHPTISVPSTTS

SEQ ID NO: 35276 - protein, 154 aa, Homo sapiens
MWDVGFASRFPVPPTSPCWCLHLLPSILQCLLLWAWPQGYGQTPVPSQRPLVIVPWHVGRGPAGSAEELRMEAAEEALMGPTIPDPSLLPGGPLVSFLVWAEAITWMPTWEGTSNVGPQPLSSSKSLHSHGDTLHLFPRDRLDPETLDPGPPLE

SEQ ID NO: 35277 - protein, 15 aa, Homo sapiens
VVSVFLLFTLPESVL

SEQ ID NO: 35278 - protein, 52 aa, Homo sapiens
RPRSRGPWMCLDGKMARRHRRRHSSIALGKGLLCLWARPTATSLLFLTTRWW

SEQ ID NO: 35279 - protein, 9 aa, Homo sapiens
LYRDCVHRI

SEQ ID NO: 35280 - protein, 64 aa, Homo sapiens
MGLGPGLLTGLLSGAVAGGALSPLPATRSTPTPPLPGQAGRRCWRGPRWRPGLGGARHEWAVAE

SEQ ID NO: 35281 - protein, 9 aa, Homo sapiens
VNMAVEEDS

SEQ ID NO: 35282 - protein, 35 aa, Homo sapiens
LNRKRFRTWMRRFVAASGVWRGSGSVLRSWLPEAK

SEQ ID NO: 35283 - protein, 42 aa, Homo sapiens
TLVSTEATGSQPGLCGTEVALSGRAAGDARKAGLGGSGCSCG

SEQ ID NO: 35284 - protein, 42 aa, Homo sapiens
LTRRKVPSPLATSLPALTAHAVILVTEKLFAWKVPACLPAGP

SEQ ID NO: 35285 - protein, 56 aa, Homo sapiens
RIWSLKICLTWYIRLLSQSQVTEHAFPTIYLQMHSILTLLELKRQIGEEDKINICK

SEQ ID NO: 35286 - protein, 35 aa, Homo sapiens
VTRFPPTLSPVSIVGLSLNPLVWIILSRLALLSLF

SEQ ID NO: 35287 - protein, 30 aa, Homo sapiens
RTWGSILQNSSWLFQDLGLHLAEGCFLETP

SEQ ID NO: 35288 - protein, 29 aa, Homo sapiens
MKCSALFSFPCCPWGWRSTGLPGSGLQPP

SEQ ID NO: 35289 - protein, 43 aa, Homo sapiens
MSPGLPFPPRLRPTRWSFPSVLTTSVFLMPDPGAEIFVERINV

SEQ ID NO: 35290 - protein, 306 aa, Homo sapiens
MDGRGAFWTVAIPRARQEGLGRLGLPFPVKRTPPAPQNPGGSTQAPQRVVGKSHSGIRMPAKSRNLRLESKLNRKVVKYKWGKQGSGAGRELVPAFPTNAGLGRRDRCRPPPAGGDVASHGLPGSGVGYSCNQREEGLRGGCGGIPHVPLFLSPLPLDASGQRPSSTYRQSLRRGLGTRAHQSPANEIPELGDLRGSRLAQEPAVLFGLRPSISKRGLLARRLWAQPMLLSGWVVSTTTTIITVTVTFTPTGLLCVKHSRGPLQPTCQESAPENRVGKGQCPSESSCRQKAGEVRSFVYLKGNKLL

SEQ ID NO: 35291 - protein, 62 aa, Homo sapiens
MSSCAVATLSGSASCPGLPVWRVTPPSPRDTSESRASASCWRVTTSMRCACLRTCWATARRT

SEQ ID NO: 35292 - protein, 34 aa, Homo sapiens
MLQAADLSGIKHMTPVEAEATPSWKLTCHIDLTE

SEQ ID NO: 35293 - protein, 97 aa, Homo sapiens
MLCKSSMSSWWKRGLRPSACSCCTAAWPRATSRAVSTTSPENCRHSSRAMAKPMPLLAPVTSATRLQDDMAERGARGTCVEGGPGFGPPGARPEEPS

SEQ ID NO: 35294 - protein, 36 aa, Homo sapiens
MSSANHCPPSTHSGKWSVMQPCSLPSRTVHRQGLPH

SEQ ID NO: 35295 - protein, 29 aa, Homo sapiens
MRTSNNGLPWLPLLPHFSTLGILASPPQL

SEQ ID NO: 35296 - protein, 16 aa, Homo sapiens
MGLLEMRKSMTLQGLL

SEQ ID NO: 35297 - protein, 51 aa, Homo sapiens
MFTEILIVVSLPQDFIVWKMPSPSNLSSRPGSPKVTNFNGALKLNRNHPSH

SEQ ID NO: 35298 - protein, 30 aa, Homo sapiens
MEPHPLPPLGIWTHVFFLLRLQNCRDVFDF

SEQ ID NO: 35299 - protein, 133 aa, Homo sapiens
MAGRMGPLRGVWGLSLPFFHLFPLSLSFLHRNIHIPRNLFLRPLFLLCLSLSLSHTSHTHTPTCNYSVSLLGSPTFPSPPHLYALESVETPALPNQRCQKWGHDFWTEDMGHAPMHPHPRPSGRLTYLIRSSS

SEQ ID NO: 35300 - protein, 30 aa, Homo sapiens
MTPSIHARRPHPRPALALRPAPRAPSGQWP

SEQ ID NO: 35301 - protein, 20 aa, Homo sapiens
MLIVLFFLLAVHFGGYYKEI

SEQ ID NO: 35302 - protein, 53 aa, Homo sapiens
MTPLQAKEHGALLGTTGRSQKTGLELAFPHSPRRNPPWCHLDFGLLAFRTGRE

SEQ ID NO: 35303 - protein, 15 aa, Homo sapiens
LMNPDPLGFGYRMWK

SEQ ID NO: 35304 - protein, 64 aa, Homo sapiens
ITYACMPLTPAGPTPIMILCPKLIYTSGSSSLLKTNAQMLFTDIYILVSLSCPTLLLFPIPNSS

SEQ ID NO: 35305 - protein, 76 aa, Homo sapiens
TALSPRERVSSPARGTQSARVVTATSRRGTSHLALQVVSAPIPLTEAESFGPPWALRLQRSMSAVLWNPECSCLDG

SEQ ID NO: 35306 - protein, 48 aa, Homo sapiens
METANPTQETVFENRASATCMMWIGEMVCPPSHGMSLLCSGIFPSLGF

SEQ ID NO: 35307 - protein, 58 aa, Homo sapiens
LNEVPAPLSPEPGAFPARWTVSPAVSMIVFLLQVLLMFKIACQLLSHEFSNKKMKSLC

SEQ ID NO: 35308 - protein, 28 aa, Homo sapiens
VEYCCAVPSLPETTAACILHRARRSADA

SEQ ID NO: 35309 - protein, 52 aa, Homo sapiens
LPLKRRQQTKSSSFFPMTSTVCAMVPVARARAVPVRTLKTSSPLPLTFSAVI

SEQ ID NO: 35310 - protein, 33 aa, Homo sapiens
LILSVRHQAVEEESMATLYLLIYSFCIYQAQFW

SEQ ID NO: 35311 - protein, 8 aa, Homo sapiens
MQCPGHHL

SEQ ID NO: 35312 - protein, 39 aa, Homo sapiens
LGVASSCQIPCSPGDPEKHRAIPDPGTFRRLAAIWVPSS

SEQ ID NO: 35313 - protein, 48 aa, Homo sapiens
VAAAAVVFSWCPAETAAAQGVAGPTQDLPGPSALRDKGPALAKADGQE

SEQ ID NO: 35314 - protein, 26 aa, Homo sapiens
LFYDSLVVFLSVFLSFLSPMPVACRK

SEQ ID NO: 35315 - protein, 36 aa, Homo sapiens
MEKERDAWPAPCCFSHVSEEGTRLVSGDTNLDVQPS

SEQ ID NO: 35316 - protein, 23 aa, Homo sapiens
RQRDFFFLLVFFFPPSLFILKRI

SEQ ID NO: 35317 - protein, 41 aa, Homo sapiens
MEAGLKFYIRSYLFQWMLWGTTSLRTKALQLPGIWLLTSHS

SEQ ID NO: 35318 - protein, 37 aa, Homo sapiens
MNRLLSAGPGFGEAAPISGLCSHLPSVPPPTEGRPCR

SEQ ID NO: 35319 - protein, 33 aa, Homo sapiens
MRNTLLFKMAIQIILNTVYLFYLDYQQRLKHEM

SEQ ID NO: 35320 - protein, 26 aa, Homo sapiens
MPLPVLLCLTLPMPLPSATARGGNRT

SEQ ID NO: 35321 - protein, 30 aa, Homo sapiens
TNPSIKKRPLIRRRLLVSFLGTHSGFLQSR

SEQ ID NO: 35322 - protein, 17 aa, Homo sapiens
IFYIYMRRVSQLLIKLL

SEQ ID NO: 35323 - protein, 19 aa, Homo sapiens
IGCIVAFTLFHLLDMDLSP

SEQ ID NO: 35324 - protein, 51 aa, Homo sapiens
IMNISTNKKIISWYSMLNMETAQFSWRTVHLMSLDILSMIIQYLLMGSLFS

SEQ ID NO: 35325 - protein, 61 aa, Homo sapiens
VPQLRWPWPWGDRLMKSFETCLCLAMWDLTASLTSWSTSLLLKDSVSTSFVLVRQALANPR

SEQ ID NO: 35326 - protein, 51 aa, Homo sapiens
IKPFGSCLKTFKHLMALQGLNIKAFVLKGLVYSLRNIVMSFNVLRVDQGLL

SEQ ID NO: 35327 - protein, 35 aa, Homo sapiens
KESAKPLLMMWRLTAIFLFQLILPRCISQKTLIHR

SEQ ID NO: 35328 - protein, 50 aa, Homo sapiens
LICSMNENGKFPGLPSAQLSCLPPFASAAHASLSSVFCAWTLWAHPGHGG

SEQ ID NO: 35329 - protein, 48 aa, Homo sapiens
VVLLLLSHGARCFLITWLPPRPLCSCLLFGCRRCCLWPPAFCCYPESC

SEQ ID NO: 35330 - protein, 16 aa, Homo sapiens
VGPLFLHLMIGWFSNW

SEQ ID NO: 35331 - protein, 22 aa, Homo sapiens
RKWSIGMKWLLVAAWRTPAALL

SEQ ID NO: 35332 - protein, 29 aa, Homo sapiens
MNRNSANFLLINAIIMKRLMQLFLFLLFI

SEQ ID NO: 35333 - protein, 42 aa, Homo sapiens
LKLLFKTRKRRRKRKKRKMLGNIYLTCSTARTLASCCYSCKY

SEQ ID NO: 35334 - protein, 14 aa, Homo sapiens
VGGFNFSFFLVIFF

SEQ ID NO: 35335 - protein, 10 aa, Homo sapiens
LYGLDLFLLF

SEQ ID NO: 35336 - protein, 62 aa, Homo sapiens
LKCLTTLMVCISSEALKKYQVGFDIAVVRATPPHLENWEMWILRDRAVHELQAVLLALVLGR

SEQ ID NO: 35337 - protein, 56 aa, Homo sapiens
MSKSVWTKMPKVLRLIFNTIKKKNLKKMELFLPTTMTVTGSSSRDWLASTIMHVLL

SEQ ID NO: 35338 - protein, 53 aa, Homo sapiens
LTFYCSLFPRVTPRLVVSSSALFLLYFIHNSQRCWTRMGRPPVAMSPPRCSWG

SEQ ID NO: 35339 - protein, 37 aa, Homo sapiens
KFPYVISTDSCVFIVNSCLFLSYIYFFVIKLQLYFVF

SEQ ID NO: 35340 - protein, 18 aa, Homo sapiens
VCAVLHLGLLLAAWPQRG

SEQ ID NO: 35341 - protein, 32 aa, Homo sapiens
IATSLWRGHLGSPPLVLLPVCVLVLRMRTVCL

SEQ ID NO: 35342 - protein, 22 aa, Homo sapiens
RVLNMPRTQIPALLLLVLHGHL

SEQ ID NO: 35343 - protein, 17 aa, Homo sapiens
KNSMTWITICFPLFTSL

SEQ ID NO: 35344 - protein, 34 aa, Homo sapiens
TAPRWMFGQLAVSLLSCCQECLCGQENRMWISCI

SEQ ID NO: 35345 - protein, 20 aa, Homo sapiens
ITELHSFLILLLILAPNKTG

SEQ ID NO: 35346 - protein, 29 aa, Homo sapiens
LLPSRRRSRSFSRIIPSFAGPLVSMALAH

SEQ ID NO: 35347 - protein, 27 aa, Homo sapiens
IQDFLFFATILTPLLHSFFSVKYVNNN

SEQ ID NO: 35348 - protein, 44 aa, Homo sapiens
IAPTLRSQRCWMGGCRWWTSPCPSVAATWASTPLASGAPTCTSS

SEQ ID NO: 35349 - protein, 14 aa, Homo sapiens
IVLVFLPKITAGLL

SEQ ID NO: 35350 - protein, 46 aa, Homo sapiens
MRWHRCSSWGRCSCAHAHAAAPPKMAKSTSTCQAGADPPAAWTFDF

SEQ ID NO: 35351 - protein, 35 aa, Homo sapiens
KPEMPRAGLIGPSGGFSVPQAAVAISGADWLVPWP

SEQ ID NO: 35352 - protein, 109 aa, Homo sapiens
MLAVPVTCGDTARSALQPDLLARRRLKRCPSRWLCLSAAWSFVQVFSEPDGFTVIFSGLGNNAGGTMHWNDTRPAHFRILKVVLREAVAECLMDSYSLDVHGGRRTAAG

SEQ ID NO: 35353 - protein, 17 aa, Homo sapiens
LLVGFLSCVSLVFVKFN

SEQ ID NO: 35354 - protein, 23 aa, Homo sapiens
LMMSLFIARLYMMLCKTWIRRLM

SEQ ID NO: 35355 - protein, 43 aa, Homo sapiens
LRGSLSGPVEDAALRQVLALLPGAAPGPAAGAGAQLLGVPAHA

SEQ ID NO: 35356 - protein, 19 aa, Homo sapiens
MLFCTILICYSSQLIGMME

SEQ ID NO: 35357 - protein, 30 aa, Homo sapiens
VLHLSFFLLAKVPFATMGMYQVRPSRGNEW

SEQ ID NO: 35358 - protein, 97 aa, Homo sapiens
LFFLLQHSPSSAYPHPQRLPSPAVLPLVAASPSPGPLHFQLLPPKFVLVSPFPALPIRSLFHLQLFFPASLFPPPMVSPWLLSTPLASSLVFPWPWH

SEQ ID NO: 35359 - protein, 132 aa, Homo sapiens
MAAATWDKESKCRLSRGHCHHRRHQSLPVGLTLRYSAPASHQPKCFTSKHGTRPSQRKPSLRVSGHYSPHSLFPGHGRRGACVARSRRFAGHMQLTWKLKRKKPGRTASSEEHKKQGRGCAGRRLIKNGVYL

SEQ ID NO: 35360 - protein, 122 aa, Homo sapiens
LPPATSTPPCSCPFLLLPFLLLSSLSSPPSSSLLLFPLLLSSPPLSSPPLLSASPCFSNTSLLSMFSLHVVPTLRTGGRRGWLSAWHLVSTQHMPAAAGTALISKSLLRVRCVPGALARGAW

SEQ ID NO: 35361 - protein, 80 aa, Homo sapiens
MGSDSASFQIRSSSCHSRPRNPVAPSSPVSGPLGSHLHLLSLPALLSIFLEFALLPPRAHPRAHPCPCTVPCPYGFILYT

SEQ ID NO: 35362 - protein, 35 aa, Homo sapiens
VLFVLGFAAGTIWQALSYVYHGFCHVDIMAGLPHC

SEQ ID NO: 35363 - protein, 184 aa, Homo sapiens [sequence omitted]

SEQ ID NO: 35364 - protein, 44 aa, Homo sapiens
LTSLFFVDQFFTLPLSFLYFAHRGCGYLVLLFFLCPTGPWIPAF

SEQ ID NO: 35365 - protein, 63 aa, Homo sapiens
LPLMLLHVVKPPLPVYPDQDLASRIQGCLCEMISLGPQAGHSQHRDVIDCTTVIRLSSALREK

SEQ ID NO: 35366 - protein, 71 aa, Homo sapiens
LIPGWPENLSLVKSNIKICLLLILMLPAQQVHQRARMNYGCHECPCEAVGKPWLDCEGYLKSILESTRSSM

SEQ ID NO: 35367 - protein, 19 aa, Homo sapiens
LLSALVLLLVLQKRQKNKR

SEQ ID NO: 35368 - protein, 42 aa, Homo sapiens
MLLIIFPLLLVLVLRVRTRVVGRGCFLTGLFIGTMYYLSNTM

SEQ ID NO: 35369 - protein, 28 aa, Homo sapiens
VVGLLAALTLNLSVRGEGICRCGFWSCS

SEQ ID NO: 35370 - protein, 84 aa, Homo sapiens
MAVWPEVSQNRLTRGLLLPNYQLRGSVPKREKRPKRKHQHLFTPSERHSVCLDCLLEISLSGKQWRNVISFNCFCTTKTLFWVN

SEQ ID NO: 35371 - protein, 51 aa, Homo sapiens
VVEKREYDLCIGRVLSLFVVVTTYPIQLYVSFSFLIWWHWYNHTLKSVVHF

SEQ ID NO: 35372 - protein, 109 aa, Homo sapiens
LAPPPPAPLLGPPPAGRLPRSTYLWCPALWPLSSRPRAPSARPVQPGLPGSRRPPRADRVPMDRRTDTCRSDTADPVTWRIVFIPHLRICPNWSAGPIAMGLFAASFQT

SEQ ID NO: 35373 - protein, 47 aa, Homo sapiens
LDFIRAFLLLLVASVPGKIGSQNLTAQRPPVATSFLQMESSEPTVRK

SEQ ID NO: 35374 - protein, 29 aa, Homo sapiens
MTRGKSASEEKSPCRAEVRDQGASSGLRS

SEQ ID NO: 35375 - protein, 150 aa, Homo sapiens
MLGSRVDRPKLSVAPSVVLEEDQVLVSPAVDLEEGCRLRDFTEKIMNVKGKVILSMLVVSTVIIVFWEFINSTEGSFLWIYHSKNPEVDDSSAQKGWWFLSWFNNGIHNYQQGEEDIDKEKGREETKGRKMTQQSFGYGTGLIQRNTQRL

SEQ ID NO: 35376 - protein, 145 aa, Homo sapiens
MLGSRVDRPKLSVAPSVVLEEDQVLVSPAVDLEEGCRLRDFTEKIMNVKGKVILSMLVVSTVIIVFWEFINSTEGSFLWIYHSKNPEVDDSSAQKGWWFLSWFNNGIHNYQQGEEDIDKEKGREETKGRKMTQQSFGYGTGLIQT

SEQ ID NO: 35377 - protein, 228 aa, Homo sapiens
VQAREGKRGPATLTGDFIRLPGTHTLSLTHSLAGLPAVCVRGGDRLGAARCQRSPAPRAPTRCALPRAEARPAGPRAGGRASARAEAARWLIRARRASPGPGAGRGPAQPSSPRAGPRRPGSADQEKIMNVKGKVILSMLVVSTVIIVFWEFINSTEGSFLWIYHSKNPEVDDSSAQKGWWFLSWFNNGIHNYQQGEEDIDKEKGREETKGRKMTQQSFGYGTGLIQT

SEQ ID NO: 35378 - protein, 17 aa, Homo sapiens
MGSSSSFYSCCFLMAMA

SEQ ID NO: 35379 - protein, 38 aa, Homo sapiens
LLLPFLLGFPVFEPWEAGCSRLLTLCLSLTNTKASISL

SEQ ID NO: 35380 - protein, 12 aa, Homo sapiens
LHVLVALITVMI

SEQ ID NO: 35381 - protein, 101 aa, Homo sapiens
LIDGVRGRRQMTAFGLGIPTFLVMQPSGSQPRFPALTQNGVALVRTPLTSVYLRVRPILPAGLCLGVTLPELAPTTVATVMLMCDCCQEPAHMTVWRKFFP

SEQ ID NO: 35382 - protein, 87 aa, Homo sapiens
LATRPWAKSRRGYTWGLDVPSRLWWALSPGFLAACCACGSLGTVGLCVCPCVCMCVCMFLSPLDSCTKWLMGTISRQIVKIDRKSFS

SEQ ID NO: 35383 - protein, 22 aa, Homo sapiens
LRPGLLTFCPPLSAGSAWSKRC

SEQ ID NO: 35384 - protein, 44 aa, Homo sapiens
MFVVLISVFVPSRSVMPCAASVDGVMYNELHESLQGCLQHVFSK

SEQ ID NO: 35385 - protein, 50 aa, Homo sapiens [sequence omitted]

SEQ ID NO: 35386 - protein, 49 aa, Homo sapiens
LQAGKMRRFFFFVSMMIFAATWLWRAADTPSYSRGCFLEADSVCSLVEL

SEQ ID NO: 35387 - protein, 62 aa, Homo sapiens
MGELAASANHGHSPCYPERKGTPGDLSKRKMLVHFYPRRHSHPRATQQWILKNKTLCRRIKE

SEQ ID NO: 35388 - protein, 39 aa, Homo sapiens
LALPASIVMLVLPVHRLLAAETTNFLQTRRCWWLLHSSG

SEQ ID NO: 35389 - protein, 36 aa, Homo sapiens
MPSRKLMLLGPSQADLGTSHALLSSTRPLHSILEED

SEQ ID NO: 35390 - protein, 29 aa, Homo sapiens
VGTAEFELRGEGKVFLRCGGEREADAGKP

SEQ ID NO: 35391 - protein, 39 aa, Homo sapiens
IFFSWCVWWLFLSVEGKRRYHPRLSPTPLQNGFSDTPAV

SEQ ID NO: 35392 - protein, 52 aa, Homo sapiens
MGVQAKKGQKKKEKGRKTKQNETTQAATYSLKERIPGRETRQFLFLCDNKKR

SEQ ID NO: 35393 - protein, 32 aa, Homo sapiens
IWSSKSTRPLLLTVRSILAATSLTCSWTPHVL

SEQ ID NO: 35394 - protein, 42 aa, Homo sapiens
LLCSEVPRVQSPPHPILELVKATRDLLPVPSQTGLWGLRCLL

SEQ ID NO: 35395 - protein, 56 aa, Homo sapiens
LAGANRKFPTLLRFRGTVKQKPRLRIPGGDSDLVPGGKPVAEHLREIKERNKEVST

SEQ ID NO: 35396 - protein, 24 aa, Homo sapiens
IHVIFLLLVSSAANISLRGNITGK

SEQ ID NO: 35397 - protein, 48 aa, Homo sapiens
VHWILGIADGHTSWTEARAPCGPFPIHFSLLRLLVISLCVCVVEGREL

SEQ ID NO: 35398 - protein, 102 aa, Homo sapiens
LSLLLAVTGGAAALSALSPPGENEPQCPPARSQPCPGQRKTTRIPGSGRRPGWAAPVRAGDSAPPLAAVSGNWVPALRGFQRTGTPFPGSPAHPAGEGGRCR

SEQ ID NO: 35399 - protein, 14 aa, Homo sapiens
LLMEEKDGLCLELL

SEQ ID NO: 35400 - protein, 61 aa, Homo sapiens
TCGGRRAMIAAGEVRAPFTWGPSRTAPGPMPLQGPGASQREGEGERSWRGQIKANPQSADI

SEQ ID NO: 35401 - protein, 80 aa, Homo sapiens
LGLWSEETKMKFPRHRASVTGGIRFLIHTPTQQPPGNMTHLTPMGPKWALSCLRLWLIPGWLMCWEMGKAFLLKGSTQKA

SEQ ID NO: 35402 - protein, 34 aa, Homo sapiens
ILVSGKEAEETAPERQLHEKDQDVADFEVGRRRP

SEQ ID NO: 35403 - protein, 75 aa, Homo sapiens
IALYMSSLFLSPPNQSYTARFLKQSQLQSLISPLLLLLLSSLLLICIFSLVKLPSLCSLFSVFSLERYSCKSELI

SEQ ID NO: 35404 - protein, 12 aa, Homo sapiens
VHNPKGRLVTYN

SEQ ID NO: 35405 - protein, 89 aa, Homo sapiens
RENQMKERGRERKEEKEGEWKDVWIWMYGFHSFYPGKSLLILQCPSKMASLLGHHLQSLLQAGSYIPQNNHPSDHASVWGNEDQPRNLR

SEQ ID NO: 35406 - protein, 40 aa, Homo sapiens
LYAKELVLGAPWFRRQPPASSSFCCCSWGLCLLPTPALCP

SEQ ID NO: 35407 - protein, 70 aa, Homo sapiens
TEARLVFLQKFPPWAVVEVVTVIVAAPAAATATTRDGGGCSRNCNIPEVFPELLGCPNRRGPPGGVRGAD

SEQ ID NO: 35408 - protein, 58 aa, Homo sapiens
KNKADSAFLVADWMHPLEENDHEGQMAVKQEELASGSEENAVPLPHGLRCPACSEKLL

SEQ ID NO: 35409 - protein, 18 aa, Homo sapiens
KVSEHGSSNMREEESGVT

SEQ ID NO: 35410 - protein, 16 aa, Homo sapiens
LEQGFCCGGKRPETSI

SEQ ID NO: 35411 - protein, 25 aa, Homo sapiens
LAGLGTAELADFRSGPLLTAEGKAG

SEQ ID NO: 35412 - protein, 16 aa, Homo sapiens
LSSFTHLSDIPAIPEH

SEQ ID NO: 35413 - protein, 4 aa, Homo sapiens
RTWG

SEQ ID NO: 35414 - protein, 131 aa, Homo sapiens
KVDAQGLEAQRNPLRSVAPLSPVPKDYSAPQRFQCPQSNLSLKYWLSSERVPEDPALLKSEAVSPLIQRIRDSRNESIMEAAGGFQVHFHPSNGDGRFIETSSAADLEVISYSSKVSVTERCFIKVCTVLF

SEQ ID NO: 35415 - protein, 21 aa, Homo sapiens
LCVPLHGALGCGGQGQSPGAG

SEQ ID NO: 35416 - protein, 50 aa, Homo sapiens
LQPSGMAGRPTESAGEPRGVLESCMSGRTVATMTERPPWAKREVSCPASC

SEQ ID NO: 35417 - protein, 11 aa, Homo sapiens
KSQVMMPHLDW

SEQ ID NO: 35418 - protein, 26 aa, Homo sapiens
LPRLRKSLVLGGGGAAVAVMATGLGG

SEQ ID NO: 35419 - protein, 92 aa, Homo sapiens
VCVLGVCVLGVCRGAERRAGPRGRKEAVELPGLGLRLPSSALLPVRSDAAAAVALSAPRWGRGAQAGSSENPLRRLPVPAGLRMPGRLICTY

SEQ ID NO: 35420 - protein, 21 aa, Homo sapiens
RRRGPPPVVFETRFGHRSFSL

SEQ ID NO: 35421 - protein, 16 aa, Homo sapiens
LVSAGGCCEALGSTQS

SEQ ID NO: 35422 - protein, 22 aa, Homo sapiens
MTHSRRKSKEELYKLLQFSIIT

SEQ ID NO: 35423 - protein, 41 aa, Homo sapiens
RSFFSALVRFLFGFLPASGATRVARQQPLGDLVLGSCPAWG

SEQ ID NO: 35424 - protein, 56 aa, Homo sapiens
LVVTAGGAGPGAQRGGLWRSEGRRCFVAWTLVSALEQAGAWSAAGPPWSPRWARAS

SEQ ID NO: 35425 - protein, 88 aa, Homo sapiens
TRETGEGAGSGKQERERAALARIGRRRGHEQGLSTYCVPSRFTKGFSFDVHYSPCPGVLMPHLQRDKPDFGEVKSLAESRTARVCVTP

SEQ ID NO: 35426 - protein, 77 aa, Homo sapiens
VFSYPGESAMNLNHLLAGSCSCSFFADRHIVGAQENKCWKLEIELDSSTLGTRHESSPARGAPGFSRPRREHLRMGW

SEQ ID NO: 35427 - protein, 72 aa, Homo sapiens
KEINIFKLDVSTVLLFCLESGTRGASACAAGAAGNSGCFSLSLSFLGAHFCCFDSRAYQVRSEGGRRQCPFC

SEQ ID NO: 35428 - protein, 87 aa, Homo sapiens
LAHLGTREQGPEENPEGLGPLQLAVTLPCLSTPLSLRSYLVSSMRIIQAPLQTTELEGPESYQKHLQFSYEKLKPRSDLCSQGHTAS

SEQ ID NO: 35429 - protein, 24 aa, Homo sapiens
MGKGRLIAARNGELVLRKCGVSWE

SEQ ID NO: 35430 - protein, 23 aa, Homo sapiens
MSSPGDQSHLEDLQMELPLGVQL

SEQ ID NO: 35431 - protein, 9 aa, Homo sapiens
MGITQRNAG

SEQ ID NO: 35432 - protein, 32 aa, Homo sapiens
VGRKQSGRIPGVWGAAAGRARASRFTPTSPAH

SEQ ID NO: 35433 - protein, 23 aa, Homo sapiens
ICGDRGSGCDWKLLEMAAMRTPT

SEQ ID NO: 35434 - protein, 17 aa, Homo sapiens
VATVAVAVTGSFWKWRR

SEQ ID NO: 35435 - protein, 35 aa, Homo sapiens
IRVNLISRQLNTFFLAVLLVVCMPCFHSVCTGKRT

SEQ ID NO: 35436 - protein, 47 aa, Homo sapiens
VSMEGLAWVCMEGLAWVSMEGLAWVCMEGLAWVSMEGLAWVCTEGLV

SEQ ID NO: 35437 - protein, 44 aa, Homo sapiens
KPRDTCWRADGICLAWAGVLALLLLSCRATSDDRLFPLSLSFSS

SEQ ID NO: 35438 - protein, 8 aa, Homo sapiens
VVAVRSEC

SEQ ID NO: 35439 - protein, 13 aa, Homo sapiens
IANPKIPVPGDSD

SEQ ID NO: 35440 - protein, 9 aa, Homo sapiens
LRSSGECRG

SEQ ID NO: 35441 - protein, 14 aa, Homo sapiens
VAGVRLWTKRRPRW

SEQ ID NO: 35442 - protein, 77 aa, Homo sapiens
IAFGGAPVACRIACGLCNLLRFKTDGHMCQWGSLSPGPKKQGTKFKTLASSQPLKPWPPEFPFLSLSFYFFYFYFYF

SEQ ID NO: 35443 - protein, 28 aa, Homo sapiens
VWRSLRWSAETNEGARIGKFCLSDLYAS

SEQ ID NO: 35444 - protein, 21 aa, Homo sapiens
MCRNSSTELSERRSENGLPRR

SEQ ID NO: 35445 - protein, 76 aa, Homo sapiens
LWLMVRTTLLTVSKVGSYPLFWKPLCSTPLGSRKGSGQDLHLGADPSCSQLGPSPSVGTRKIFAHLEKLLVQPNFI

SEQ ID NO: 35446 - protein, 21 aa, Homo sapiens
IFSMPPPTCDFMTHIASPEPA

SEQ ID NO: 35447 - protein, 55 aa, Homo sapiens
LPMNLLCIAPMFYSALMTSGRKMCCAMSPSLWRDSGSALTGPCWRHAAVTSTQES

SEQ ID NO: 35448 - protein, 55 aa, Homo sapiens
INWLLGWMFSTSFLAANFSPIVFLLQQGEKVLCGPRRAVKLRVRGSVRGRMCVRV

SEQ ID NO: 35449 - protein, 66 aa, Homo sapiens
TADMAAERPAGILDRRGGFARPRIAGEWFPRGIGLPAAPALYCDAQPVMTGVESAEPPWPKETLPL

SEQ ID NO: 35450 - protein, 15 aa, Homo sapiens
LPRPLSLGNVKCGLS

SEQ ID NO: 35451 - protein, 66 aa, Homo sapiens
MPPTVRRGCWARPGWSLGLAGAAQNCLLRKRCSPGPPLSPGLRRTRRLPDQRVPEEDSVATGFSRV

SEQ ID NO: 35452 - protein, 55 aa, Homo sapiens
LLLFSSFVFFFSLETGSSYVGQAGLESPGSSDPPASASGKVGLQARIAAPGQSLF

SEQ ID NO: 35453 - protein, 84 aa, Homo sapiens
MQLLFLVFVLFLFLFLIFIFLETGPCSVAWAGEQWHHHSSLQPQTPGLKRSSPLSLLSSWDYRCAPPHPAKTAILPLRVIRKIH

SEQ ID NO: 35454 - protein, 112 aa, Homo sapiens [sequence omitted]

SEQ ID NO: 35455 - protein, 25 aa, Homo sapiens
MLKRKHVFSSSCIFMWSCSLPNVED

SEQ ID NO: 35456 - protein, 88 aa, Homo sapiens [sequence omitted]

SEQ ID NO: 35457 - protein, 28 aa, Homo sapiens
MRKRWMALSAAVIAASARELSIAAAPEA

SEQ ID NO: 35458 - protein, 18 aa, Homo sapiens
ILWTWAWLECSGVLKILL

SEQ ID NO: 35459 - protein, 74 aa, Homo sapiens
VLPKPLLPLWMLSLTLTHHCASLQTPRAQDWARPRDSHPFPSWEELACLATDSVSSNWLKWALPRVQLCGFYHA

SEQ ID NO: 35460 - protein, 57 aa, Homo sapiens
LSTSGALLINTSEKMMEPSCRSWGELRRCCHRCRAGPHSDRYLSRWGAARSAPGRRR

SEQ ID NO: 35461 - protein, 38 aa, Homo sapiens
MEPQVYAVQLPSPPESPCSSPTSVPLSLFTRNKGRISL

SEQ ID NO: 35462 - protein, 131 aa, Homo sapiens
LAPDVCSFTGCLICLLHPTGPPTSSDVFLIMSAMCPILLHALPPFPTTAEWPGTCLKCLFPISLRDQEGILGMPLTSLLSRQQKWRGSQESALNCPPGWQGSLNRYLELGSGLFPCVLTTRASCSRAGIRG

SEQ ID NO: 35463 - protein, 78 aa, Homo sapiens
MTPKQVPESLHPQLTISGSGVSLQHRDLRHNTSRGFIRHLGPGRKRNAEVVLPVAYLKAPSSLLWEDETLGCCKTSFE

SEQ ID NO: 35464 - protein, 52 aa, Homo sapiens
MSSLFNIFFPMPSLWIPTAGFCLLHAENKITYSLLMQSEAPEEQRAQLPEPH

SEQ ID NO: 35465 - protein, 60 aa, Homo sapiens
LPATPAVSYWLSEGIEVKGYCFYPLSFFPFLIKVLFSFFPENLSHQMRLLSLLWLVVFSL

SEQ ID NO: 35466 - protein, 74 aa, Homo sapiens
LTTSPSAPVSCGLVSSRLSWPHRSPIRAFPVLCPGSGSAIFGLSELVCYSVVAESTEAVFASLFLAVERFPPGG

SEQ ID NO: 35467 - protein, 36 aa, Homo sapiens
LLRHYRAQAMDGKRSLLCFFSTVLIYTGMLKPSYFA

SEQ ID NO: 35468 - protein, 16 aa, Homo sapiens
VNMRLGLQKLLYGILF

SEQ ID NO: 35469 - protein, 68 aa, Homo sapiens
LKSVNVAKSLVLFFETGSCLTQARVQWPLKLTTASNFWAQVILSLPVVFVDCLMESHGTRRLKQCLQF

SEQ ID NO: 35470 - protein, 81 aa, Homo sapiens
LYFALINMLASLSGFLMTTTSKHAAYCLKGSCLTQARVQWPLKLTTASNFWAQVILSLPVVFVDCLMESHGTRRLKQCLQF

SEQ ID NO: 35471 - protein, 57 aa, Homo sapiens
LYLISLGMVLGADAVWLWIAPYGQLCPQGRMRIATEVLKSKPNSSHWHTGIRQKAGS

SEQ ID NO: 35472 - protein, 43 aa, Homo sapiens
MYLNSPASLLAIFSHSIAFAVFYLDQYLISFSFSSLLWGSRSG

SEQ ID NO: 35473 - protein, 40 aa, Homo sapiens
LKVTRLLLPIFRLLLAEAERLTLHNMAAWCVWCPRADESR

SEQ ID NO: 35474 - protein, 96 aa, Homo sapiens
MTSTELWNICVAGRARRGTAQRRQVLEVLVNTGFQNSSRPAVFPARLKAGDTHAPVLEAVAFDQAWDQEVRPALRHQPKDPLNLPSPPANKGTSRC

SEQ ID NO: 35475 - protein, 42 aa, Homo sapiens
VGGKKLLSDTLVLLIISNLYFCVNVLCFVYHDYRIRNLCKYT

SEQ ID NO: 35476 - protein, 35 aa, Homo sapiens
LVDTGIIILLFFPEFFSFEFQLWTFYMCLHFSCLP

SEQ ID NO: 35477 - protein, 56 aa, Homo sapiens
LKKMKPYYLFVRFSTLLLYTVLRHYSLEVLTIYSLLKFNLLDNDVSTQDDFLGHSG

SEQ ID NO: 35478 - protein, 117 aa, Homo sapiens
MAMGQRTPSLAELRKSSATFLTCNLGAQAEKRTDQQLPATVPSLPGLGHMAQGAAEGWLAFSTMCPWNLLPQSGSPAPTHSNYTSPPGEGNTCIRIRGSSTGILKPFFFPLLHNISI

SEQ ID NO: 35479 - protein, 20 aa, Homo sapiens
LLAVISIFVEVGSENRYTVD

SEQ ID NO: 35480 - protein, 67 aa, Homo sapiens
LRPRSAAFAPRYTRLVMRRSSRSFRLQCTGFPSSSAQSISAHLSNSMPSSLLTISRCPGMFAVRCPL

SEQ ID NO: 35481 - protein, 124 aa, Homo sapiens
LLVPLPSAAPSLVRDFPVALDLRIYSSTPSAPHYPESHRVSVVSPVDVAGVSWYCGGTQVVHAWDSGGRREGQLRVDVKPPFLFWTQPGLHCNLHQDQDPGPQAGMVLPRKGHFRRSPAWAIQS

SEQ ID NO: 35482 - protein, 51 aa, Homo sapiens
MEVASVAAYCAGCSSLCSAARCRIRCPLWLFCWLEDRPGAATPPLGKAETL

SEQ ID NO: 35483 - protein, 15 aa, Homo sapiens
MPAFDCPVEASSYAF

SEQ ID NO: 35484 - protein, 9 aa, Homo sapiens
MSCGLVLLW

SEQ ID NO: 35485 - protein, 22 aa, Homo sapiens
LRTLAAPRRALFFRLGMLLTAG

SEQ ID NO: 35486 - protein, 75 aa, Homo sapiens
LNLTMFLGWSQLFRVPVCVISSAGWLSSELLEIFTHASANHFEQGCLLVDDLLFFMTGISGICFLAVFSTFLPPW

SEQ ID NO: 35487 - protein, 124 aa, Homo sapiens
LSLCKVWAFLFLFFKGNEMEFEGTFSLTPLLCVLHGACPRASANSSISSHSVLGTIPGLCWRDETAVEMKTGCRGWHSLAGFSPSGDSPTPRTLHTSSSHRSHLLFFFFSETTDHSDFSFPLFN

SEQ ID NO: 35488 - protein, 55 aa, Homo sapiens
VVALRPRQRATGLPVAPGFLCAAVCLLSCRPLSSAKRPCPTWPLGPVTFPSCPGK

SEQ ID NO: 35489 - protein, 90 aa, Homo sapiens
LWYPGALASMWPLQHISVASVSVVSFLCLAPHGFKSTRAGVETAHLALILSDWWFWPVSRYLSIGKAALRCGGHPDSHRLHSRNGSMRLY

SEQ ID NO: 35490 - protein, 39 aa, Homo sapiens
MKCGSILYVSTPTFSLPLSGTAEPGLAQQISLSTHLLQV

SEQ ID NO: 35491 - protein, 44 aa, Homo sapiens
MWPWNAEQNVDVLVVNVYILYSTFIYTLEVLIRERSVNCSLFFI

SEQ ID NO: 35492 - protein, 64 aa, Homo sapiens
LRSSQNNYLLTWLSDQRMHLLLLPVIFLPWVLPQHKHTSATPGFSSEKQFMSETENQTANVKFY

SEQ ID NO: 35493 - protein, 76 aa, Homo sapiens
LGAACRMTRGSEAHVAGAGTQAPGAPTDYVAGGAGSAAPWWGLFMAVPGSPTFFPAVVLNLSKAEAVELEVLAGVK

SEQ ID NO: 35494 - protein, 44 aa, Homo sapiens
LRSKLSATSWTLGTLLRTMAFNSQTRTFRITKETGSFHILILVM

SEQ ID NO: 35495 - protein, 49 aa, Homo sapiens
VSLLIVLLSLPRSRFSIRLLGIRLFTRPHSRPTRALVAPWVCFILKRSG

SEQ ID NO: 35496 - protein, 90 aa, Homo sapiens
VTLPPHQESTDLSSFTNLILLAGGNTMGAVTLTVIERWEEVPFPWTGIFSTIVLSCLWGQCVKSPLRNFQRKEHFMRLSLKFPLYRSMLT

SEQ ID NO: 35497 - protein, 59 aa, Homo sapiens
MGSSRGSAPGRQRNPSLLPLREGVDGARDLEHGRNRDLKESQDTGTRTPRRTRRVSELL

SEQ ID NO: 35498 - protein, 65 aa, Homo sapiens
VSPQMPTTVPSSMFPCSLFLLWSQLWELLWSQLWGLLQLWGWWLLPEPPQAPSLPPAPAPEPRLL

SEQ ID NO: 35499 - protein, 83 aa, Homo sapiens
LSLTCLLLVHLSIAHLHHARINALLCNHTHPASRSIHPRASNITRIHQDHETTRSSGSSYSQDSIIFPSAVVGGCIFPNLCLA

SEQ ID NO: 35500 - protein, 26 aa, Homo sapiens
MAVAEARPNSRLAAPWLARVCSFWAR

SEQ ID NO: 35501 - protein, 83 aa, Homo sapiens [sequence omitted]

SEQ ID NO: 35502 - protein, 75 aa, Homo sapiens
MSTQLGSPRALCPFLSAFLEHEPTQGTQQQGIPGQCRAHSPASSCGHRSGRSSPHLSPNMGFLEAQSFNQPASIH

SEQ ID NO: 35503 - protein, 34 aa, Homo sapiens
LRRQRFLGFCLVLSLQKVLPVPPALGTRLCIASP

SEQ ID NO: 35504 - protein, 25 aa, Homo sapiens
LMIFDLFSPVLILKAPSFFFFFFFF

SEQ ID NO: 35505 - protein, 15 aa, Homo sapiens
RKFPRGPPRWLLCLM

SEQ ID NO: 35506 - protein, 26 aa, Homo sapiens
LIPSVCFPTHDLLFPWPRHTKNNSIK

SEQ ID NO: 35507 - protein, 9 aa, Homo sapiens
KWMVCLFAV

SEQ ID NO: 35508 - protein, 5 aa, Homo sapiens
MGRSD

SEQ ID NO: 35509 - protein, 20 aa, Homo sapiens
IEVLLFFLMPWLCEFESKQL

SEQ ID NO: 35510 - protein, 18 aa, Homo sapiens
LLLLFTLLLGFYEGFVKS

SEQ ID NO: 35511 - protein, 47 aa, Homo sapiens
VARVFGLCLLKPLMGGGACRRTGAGARVQKLGRWASSPTAVSRGRIP

SEQ ID NO: 35512 - protein, 29 aa, Homo sapiens
KDPTLGYLGVKMCYFTHRLVPHDQGLCLP

SEQ ID NO: 35513 - protein, 16 aa, Homo sapiens
KHLLTVDLAKSLCCVS

SEQ ID NO: 35514 - protein, 14 aa, Homo sapiens
ILGALWTLVIINQE

SEQ ID NO: 35515 - protein, 65 aa, Homo sapiens
VFLQKFPPWAVVEVVTVIVAAPAAATATTRDGGGCSRNCNIPEVFPELLGCPNRRGPPGGVRGAD

SEQ ID NO: 35516 - protein, 40 aa, Homo sapiens
IPPIPANMTAAVSLTRSPAISASCAASRSASPWAWPWTWF

SEQ ID NO: 35517 - protein, 81 aa, Homo sapiens
TEEREMAKTRRDRWMTTSAGQKTTLIAFMRMTASPSQKATLIASMRMTASPGQKTTLIASMSSPWGIHGEDIFEGEIPNAS

SEQ ID NO: 35518 - protein, 20 aa, Homo sapiens
VDWLGALVHVACVVQLLSTL

SEQ ID NO: 35519 - protein, 90 aa, Homo sapiens
ILLPGDPLSSHLLLLPLLLHRARARTPPGCRSRTAPARTTRRCRCCGTRRSRWPCPWCTRWWRRSASRATSSLCGCCAGAWGPDPRRSSS

SEQ ID NO: 35520 - protein, 73 aa, Homo sapiens
VASVSVVSFLCLAPHGFKSTRAGVETAHLALILSDWWFWPVSRYLSIGKAALRCGGHPDSHRLHSRNGSMRLY

SEQ ID NO: 35521 - protein, 31 aa, Homo sapiens
MGSWVHNLCIICTFMYLGAGSSSGLQVEPAN

SEQ ID NO: 35522 - protein, 66 aa, Homo sapiens
RLPQSRGLGAGTLLWTTFSLSAGRATQSPFACGWTTRRTTSTRGTIMASPPCTGPAERAALLWLRC

SEQ ID NO: 35523 - protein, 34 aa, Homo sapiens
RSGPTAPSLLKVMQMKSFCLIFHLRAMSSSKASL

SEQ ID NO: 35524 - protein, 31 aa, Homo sapiens
RLPSFVVSQRCAGLLLAALRIQGVGCQVQVS

SEQ ID NO: 35525 - protein, 28 aa, Homo sapiens
LGFRGLLFLVLLLSSLFPVWPWLTLKTL

SEQ ID NO: 35526 - protein, 49 aa, Homo sapiens
TVGLPRREEPVPLRVFEVYHTTVLKIQRGQWLLKATFCSIFCSLLLMAW

SEQ ID NO: 35527 - protein, 13 aa, Homo sapiens
IVLFLLLLIFSTE

SEQ ID NO: 35528 - protein, 45 aa, Homo sapiens
IVLLLLQLMGMTARNLNEIDLPVRLPVFSIFEKFHVMSPKQRSYH

SEQ ID NO: 35529 - protein, 48 aa, Homo sapiens
VMFSPQELTGEGMGQDPSLCKASVTVMFQVFLMTVCLYLTEQLVAIYH

SEQ ID NO: 35530 - protein, 18 aa, Homo sapiens
LGCWNAWALLASSLAGLH

SEQ ID NO: 35531 - protein, 62 aa, Homo sapiens [sequence omitted]

SEQ ID NO: 35532 - protein, 131 aa, Homo sapiens
MQPIPSFSGSTWAEDRCRGAQRRALTSQETQFGVAIVTHSPGVCFDLPLPPYYFFCYLVSPWYLRILQLPSGLTDGRIKEKWHRFHLKSYKHFTRWYSLGRAFVKQMPAHCFTLLISTSAKHFSRKADPEQ

SEQ ID NO: 35533 - protein, 47 aa, Homo sapiens
VGGEVDMATLQITTAMKITMMITMVMIITTIVEAMKIPTTAMMMAMQ

SEQ ID NO: 35534 - protein, 8 aa, Homo sapiens
LVPHPPQP

SEQ ID NO: 35535 - protein, 22 aa, Homo sapiens
LDLSLIFWSLASCIFLEPQLNS

SEQ ID NO: 35536 - protein, 41 aa, Homo sapiens
MFGKLLLPRFIINIQIVYIKTVYFSSLLHISFFLVFIIIIL

SEQ ID NO: 35537 - protein, 40 aa, Homo sapiens
MDECTHSSWVSWLLFGVCYTPVLCPVSSEKVCICYSSESS

SEQ ID NO: 35538 - protein, 24 aa, Homo sapiens
LTPSLMFFIMILMQGIQMIMDRII

SEQ ID NO: 35539 - protein, 36 aa, Homo sapiens
VSMVTGLLYEVALRGLATISEGGSGLRPTAILCLPA

SEQ ID NO: 35540 - protein, 113 aa, Homo sapiens
MRLAWLYLFFLFCFGFFFFFGLTQDLKTGTVKVTAVGWSEHPPKFTMWPRTLIAHCCFFNSHSKYEMRCYRKSLAILKATPLLSKENGPVLSQVHTGEVIALLSCKLCNAKFF

SEQ ID NO: 35541 - protein, 35 aa, Homo sapiens
VESPAPAAAAAAVAVVVAAAAAGERARAGKPQSEI

SEQ ID NO: 35542 - protein, 30 aa, Homo sapiens
ITVEDMVLLMVWVVMAVVVEAVEVTMGKAA

SEQ ID NO: 35543 - protein, 40 aa, Homo sapiens
RSSVSQEMIAPPALGFWPRRWRLWLAVTLAFQARPGEATR

SEQ ID NO: 35544 - protein, 13 aa, Homo sapiens
RSVFSQCCHLSSV

SEQ ID NO: 35545 - protein, 63 aa, Homo sapiens
RRPLLCPVTFPSPGTAPRPSPASPCPSCHGSRKLWGPLGWTPWKSARSTLGPAGPPLYPSKTA

SEQ ID NO: 35546 - protein, 33 aa, Homo sapiens
RKLAHLGRSVLLGFSLEHSLDLISSERVMGQHG

SEQ ID NO: 35547 - protein, 16 aa, Homo sapiens
KDLMGSLGCSMVGKPT

SEQ ID NO: 35548 - protein, 46 aa, Homo sapiens
LCPKLIYTSGSSSLLKTNAQMLFTDIYILVSLSCPTLLLFPIPNSS

SEQ ID NO: 35549 - protein, 13 aa, Homo sapiens
ILALSSIIFGCCI

SEQ ID NO: 35550 - protein, 26 aa, Homo sapiens
MAHLSGQPCASCCWLWQCLSSAQLYP

SEQ ID NO: 35551 - protein, 9 aa, Homo sapiens
RVIIMLTWT

SEQ ID NO: 35552 - protein, 74 aa, Homo sapiens
MLASLSGFLMTTTSKHAAYCLKGSCLTQARVQWPLKLTTASNFWAQVILSLPVVFVDCLMESHGTRRLKQCLQF

SEQ ID NO: 35553 - protein, 153 aa, Homo sapiens
MRRDLTVLPRLVSNCWTQVILPSWPPKVLELQWTTFNALVLCTLTSTVMNTQLGQGSEILQSKEEGALNRWTLILLTKLWEETGASSLSETTVPLRLREMRRKFSALYCSSSPHSLLRPRQGVAFKHTDTYRQTHNTRLMVFPQTVSSGYGKE

SEQ ID NO: 35554 - protein, 62 aa, Homo sapiens
MSWQIWGTKSHVIPVTPHVLLMATFNTIPMWCIIQKENSWHVTISTTCTLSLSLMSLKSRSW

SEQ ID NO: 35555 - protein, 17 aa, Homo sapiens
MLPGDGVAERPRSLCLA

SEQ ID NO: 35556 - protein, 98 aa, Homo sapiens
MRGCPRTSMWLGPLRSWLVPSSSTPFSLGPMGTCTAWCEAATVSLSLRLPCSSARWPPPWRTVTSTVWSCVISSCVALSSLTVRGRSWCWRTWRTPAC

SEQ ID NO: 35557 - protein, 59 aa, Homo sapiens
MTAFGLGIPTFLVMQPSGSQPRFPALTQNGVALVRTPLTSVYLRVREPAHMTVWRKFFP

SEQ ID NO: 35558 - protein, 58 aa, Homo sapiens
MTAFGLGIPTFLVMQPSGSQPRFPALTQNGVALVRTPLTSVYLRVRICRVLGPRSQPS

SEQ ID NO: 35559 - protein, 91 aa, Homo sapiens
MTAFGLGIPTFLVMQPSGSQPRFPALTQNGVALVRTPLTSVYLRVRPILPAGLCLGVTLPELAPTTVATVMLMCDCCQEPAHMTVWRKFFP

SEQ ID NO: 35560 - protein, 45 aa, Homo sapiens
VLFFSLFCLCISSNCLFKMPRIWTPSTSNRHWEGEGRKAECKMKW

SEQ ID NO: 35561 - protein, 40 aa, Homo sapiens
ILRVYAPMIGLVSKTNAIISLKKKEIGIQVNTTVPLNMPT

SEQ ID NO: 35562 - protein, 66 aa, Homo sapiens
LKKCKRFFFLRKNIFLKKPASPRKATAVFFFFASFSYFRSRGFSCFSSLFFLFANKTKNSIEERAK

SEQ ID NO: 35563 - protein, 98 aa, Homo sapiens
LPQLVYLQGWGSYSLLRPAALISMVLLAREFLYPAKMSVSEVCSSGLSSPLLEQHKTNLIFYASGDICSANGKSGFNQPLPFLKTFCCTHRILSCTYL

SEQ ID NO: 35564 - protein, 115 aa, Homo sapiens
MLPPGQIPNPTLSTHTLSSGQERPENVCTNGFREALEIKEPEAATHGSQKLNAAQTTGMTSPILLPPAIAVTKAALGPQLSTSEDKSWGDSCHLREKEKTKRQRLLLEDPFTWAA

SEQ ID NO: 35565 - protein, 82 aa, Homo sapiens
VPPHPRRRVHSLLAAGPAAAAAAAAEGMSPGRARRLPQATARRGTPSRAHRSTARTPAPCGTRLRSLEAVSVIRMHWAPRSW

SEQ ID NO: 35566 - protein, 43 aa, Homo sapiens
VGGESVSAPLLTPGSVDYELAPKSRIRAHRGKYLQYLPRPRFS

SEQ ID NO: 35567 - protein, 149 aa, Homo sapiens
LASACRARQSAEPRPSSSGRPVPTGPWLATFRKLEHSRPPRLRSGAAEDSPVGWSDDKDLAERRKGCSLRLPRQGAGRAAKSDFELQLAVWNVAQEALIFLAGTVAAVLACGPGQPLPSRRAGEDWCMLGFVVRPHEARPGNIMGRNGA

SEQ ID NO: 35568 - protein, 49 aa, Homo sapiens
VAATSALLAPPFAAHAPSRGVSWPPPAELGSQQSPGHPPPAVRSPLVPG

SEQ ID NO: 35569 - protein, 37 aa, Homo sapiens
MKLGKFSQRTCSVPLGVLCGFGVLWELKHTAMLESKT

SEQ ID NO: 35570 - protein, 129 aa, Homo sapiens
LSFSARTRHLTLHFFRPPPGDPVFPFFPPLLILPLPATILSLPFTPSWQHPLPFPSLSHLLFPVARRSPSVFFMGTRCWRAVSRRNPVEGSEWRYSFSLHSSVSPVSPRSGNSFAKNGRNGQARLYHHL

SEQ ID NO: 35571 - protein, 59 aa, Homo sapiens
LKNELDLQMEKAHRIPLKFNEKKAASRHIRVTFLNFKDETFYKHPVRESRLLTKGQKSG

SEQ ID NO: 35572 - protein, 49 aa, Homo sapiens
MQKQRKGDLSFQCCITVWRKTSSKKLLWPGTVAHVCNPSTLGGRSGRIT

SEQ ID NO: 35573 - protein, 85 aa, Homo sapiens
MRCRGGPWKNLPMEGPQRDLWENNGNCRRVGQIIMATGLLEARPLKAIFCLWLERDCESFLRKSVALPGEVIKSLLAQEMKQQWP

SEQ ID NO: 35574 - protein, 46 aa, Homo sapiens
LGRDAGGDGARRACCWRVMALQGCGLRPHRESTARGSPKSEVLGER

SEQ ID NO: 35575 - protein, 66 aa, Homo sapiens [sequence omitted]

SEQ ID NO: 35576 - protein, 31 aa, Homo sapiens
LQFCIAFQFPLLVFLTVFPLYRGHLQLLIKD

SEQ ID NO: 35577 - protein, 36 aa, Homo sapiens
MKNSGSLTNSLTLLSTRKFKGGRTLRSKLQSRSSRL

SEQ ID NO: 35578 - protein, 28 aa, Homo sapiens
LELFRRSSLQSLLLLYSVGPGGAELSGA

SEQ ID NO: 35579 - protein, 11 aa, Homo sapiens
LARTAKNRRTL

SEQ ID NO: 35580 - protein, 69 aa, Homo sapiens [sequence omitted]

SEQ ID NO: 35581 - protein, 39 aa, Homo sapiens
MLGNEQIIPFDKPLMLGFHGKEKEVNKRKKCREKYGIEI

SEQ ID NO: 35582 - protein, 47 aa, Homo sapiens
LGSGGAGRGCGVSPQGSVFSAFPVLLFLTHFLSHSVTFKPFLLTVCI

SEQ ID NO: 35583 - protein, 69 aa, Homo sapiens
LRPSCVSPLRKAAEDLGGRQYPEDCGTLSAVPCSRLRRTRVGVNTLKIAALLPQSLALGCGGPGWASIP

SEQ ID NO: 35584 - protein, 125 aa, Homo sapiens
VTTKAVLLALLMAGLALQPGTALLCYSCKAQVSNEDCLQVENCTQLGEQCWTARIRAVGLLTVISKGCSLNCVDDSQDYYVGKKNITCCDTDLCNASGAHALQPAAAILALLPALGLLLWGPGQL

SEQ ID NO: 35585 - protein, 45 aa, Homo sapiens
LNRDLRLFLPSDLNGDISSLWVSSLLAFNQLFCLTAAGLGTAQPP

SEQ ID NO: 35586 - protein, 37 aa, Homo sapiens
MWQNLNGDISSLWVSSLLAFNQLFCLTAAGLGTAQPP

SEQ ID NO: 35587 - protein, 81 aa, Homo sapiens
MFTMGFLKTVLLGTSACVSPPTMPAFFSLPAERRLQAWPQSEAPLSVSSCFQNRPPEPASFQNLRPEPASLQNLRTEPTSF

SEQ ID NO: 35588 - protein, 60 aa, Homo sapiens
MALWVEKRLLGNNRILRNLVGWRSTPKIKYRSRHGFKKIRISTASSERIRRASCMPAYLV

SEQ ID NO: 35589 - protein, 33 aa, Homo sapiens
MSQLERILGWSYCMLIVLFFLLAVHFGGYYKEI

SEQ ID NO: 35590 - protein, 17 aa, Homo sapiens
MKLAPSLIWTHLWSLWL

SEQ ID NO: 35591 - protein, 40 aa, Homo sapiens
MLKLFLSHFCLNLIQTSNVLLWNGVGKMQAISNNKSVLKF

SEQ ID NO: 35592 - protein, 38 aa, Homo sapiens
VRNKSPKFPKSPWAGGHCLLFLLHRVVLSPQPARQTLP

SEQ ID NO: 35593 - protein, 84 aa, Homo sapiens
LNKQEVHPNPLIINEVEYLCAIGSCVSLIRCSCPFALLLSVGVALFFVSSYRISLYNKCNLTCICLHLFLPSICCSFTKATLFS

SEQ ID NO: 35594 - protein, 30 aa, Homo sapiens
LGAGVLLSSGAARNGGSHLASAAGMDQTAS

SEQ ID NO: 35595 - protein, 65 aa, Homo sapiens
LLLCVIIFECNYSSANLPKMLDIFFFFGEEGRARGGTWEKTGVGFWFNFFFTFFSLSNLKFVASF

SEQ ID NO: 35596 - protein, 37 aa, Homo sapiens
MGVPGAIISLPGALIPCIVSLVKSEQPGRALVQTWAE

SEQ ID NO: 35597 - protein, 9 aa, Homo sapiens
LDFWMLVYF

SEQ ID NO: 35598 - protein, 27 aa, Homo sapiens
MNDSILYHQDVLRAVYGWIDCTAISCD

SEQ ID NO: 35599 - protein, 19 aa, Homo sapiens
MLIVKQHPQLFCVVSLTPP

SEQ ID NO: 35600 - protein, 31 aa, Homo sapiens
VFGLLAAFFPLSHTLVYYFEVVFAEFERREN

SEQ ID NO: 35601 - protein, 26 aa, Homo sapiens
MVAPSFYLLAGALFQRPRWSLACTPC

SEQ ID NO: 35602 - protein, 56 aa, Homo sapiens
MGHFFLVTEAVVLIFRRRCISSRFCYIFGIKYGLRCLRFSGINFLLLNAFFLLLEM

SEQ ID NO: 35603 - protein, 33 aa, Homo sapiens
LRTPVGSVLFRHILAVTIFIVMDYLKPLLRVIY

SEQ ID NO: 35604 - protein, 41 aa, Homo sapiens
LRQSESLSSETLSTAEDELEAAAEPFSKPVKCELLINEWFF

SEQ ID NO: 35605 - protein, 34 aa, Homo sapiens
MWSEFQKLASFSLPLILTIPQEFCIQGPKVCYPR

SEQ ID NO: 35606 - protein, 58 aa, Homo sapiens
MLRCPPKWIASYLVPACCRLLHLVPLGTHCAANSSRQIHWEAVAHEGISETFFCDLAV

SEQ ID NO: 35607 - protein, 24 aa, Homo sapiens
MRLFLEIRGLRCFCFLSAEVWVLL

SEQ ID NO: 35608 - protein, 33 aa, Homo sapiens
MLLWLLMLGRSASFCSVADKLQWTLAQRTGPHP

SEQ ID NO: 35609 - protein, 36 aa, Homo sapiens
MQVAVPSRCYVAAPDPAILPQGVRAGTALPCLPGII

SEQ ID NO: 35610 - protein, 65 aa, Homo sapiens
MAGEASENLQSWQKVKGKPAHLHMMAGTLYVIEVSPKNEIVSFAKTWMELEAFILSELTQEQKAK

SEQ ID NO: 35611 - protein, 23 aa, Homo sapiens
MVTLIPEHFHRCYCDIYLCPPPE

SEQ ID NO: 35612 - protein, 25 aa, Homo sapiens
MPWFHYGRSRGLRDAKYCEAEVTDR

SEQ ID NO: 35613 - protein, 225 aa, Homo sapiens [sequence omitted]

SEQ ID NO: 35614 - protein, 36 aa, Homo sapiens
MPDLHSYPMLPRHPGLPLGALASETNMPWRNAWMGK

SEQ ID NO: 35615 - protein, 14 aa, Homo sapiens
MNSKLNELQKNSSL

SEQ ID NO: 35616 - protein, 74 aa, Homo sapiens
MSQDYCNWKSVLLCCCIPCLILKPETRKAVACLFTSCVLFKKYLLSQDNTNKVDLRIGVPGLEPCWYHLLTACF

SEQ ID NO: 35617 - protein, 68 aa, Homo sapiens
MSQDYCNWKSVLLCCCIPCLILKPETRKAVACLFTSCVLFKKYLLSQASGIFLDICSSCFLTACFFSE

SEQ ID NO: 35618 - protein, 56 aa, Homo sapiens
MNITLWRTETQKGRFRMCDLYKIKPVSPDPNTFFEHLFLHLSKNFLLSWSSSEKSS

SEQ ID NO: 35619 - protein, 34 aa, Homo sapiens
MVFDAKQMPNFGGKSTTSLLGLDRWLILKLAQST

SEQ ID NO: 35620 - protein, 65 aa, Homo sapiens
MAQLPISWREISLSDLEVSLLPPPHMNLVLEATRAVCPSAEAGGISKSSILVSFSEDPNCAVCKK

SEQ ID NO: 35621 - protein, 104 aa, Homo sapiens
MFMAEDAMGRVRRRTATQPRSQEQPRDPSSACSPPPPLLYLLRSHLGNGRQGRSAACCPSWGQEPGGSKEHHRKEAGRLARPAPKTHRYTRCSELAGPRRPLMR

SEQ ID NO: 35622 - protein, 14 aa, Homo sapiens
MPRAWSCPLPPAPS

SEQ ID NO: 35623 - protein, 49 aa, Homo sapiens
RLSLMGAFLLATSLKWNLLVALLPLQLWCYTEKLEVSKQTREKEKHQKV

SEQ ID NO: 35624 - protein, 15 aa, Homo sapiens
MFTDFPSAPTVAPLS

SEQ ID NO: 35625 - protein, 44 aa, Homo sapiens
LVSLCFGSLWPVLSRLLASRPAARPRGSSWPPRRPARARRPRAG

SEQ ID NO: 35626 - protein, 47 aa, Homo sapiens
RSLILVLNSGGGKEDDGGKEKKPFMHPSLIQYPSMRECQASGEEERV

SEQ ID NO: 35627 - protein, 72 aa, Homo sapiens
LAFRALVLLDLLGLLDLLASLVRLESEAPRGTLDQMDHRGPQDPLGNLVAREPSRVWKAVRISCVQPTVHPE

SEQ ID NO: 35628 - protein, 76 aa, Homo sapiens
TAESLHPGAARRRRAPLPPPPPPGLPGSRGPGPLHLSFPAGHKAFCCRRGDWRPSLLIPLIFQFILCLFSGQSVTL

SEQ ID NO: 35629 - protein, 53 aa, Homo sapiens
LASLVGSSSWPRQTGGGSGPDCGAMAVVSSFAAAASLAESPASALGAPTASAG

SEQ ID NO: 35630 - protein, 16 aa, Homo sapiens
VGTESRTALSRSGAQK

SEQ ID NO: 35631 - protein, 14 aa, Homo sapiens
MVEYRSLRVGKKIP

SEQ ID NO: 35632 - protein, 44 aa, Homo sapiens; identical to SEQ ID NO: 35625

SEQ ID NO: 35633 - protein, 105 aa, Homo sapiens
VTGKWFGRPRLTTPGRTDGRRRREPVAEPGDLENERVRLSVGHSVGPLNEVPAPLSPEPGAFPARWTVSPAVSMIVFLLQVLLMFKIACQLLSHEFSNKKMKSLC

SEQ ID NO: 35634 - protein, 40 aa, Homo sapiens
VVHLRCSKWDCFIILMAEEYFLVYVYESFLISLSVDEQLL

SEQ ID NO: 35635 - protein, 40 aa, Homo sapiens
MRKLEKEDGGRAHQKGIKREKRGGKKTYLRSLVCSFGQKW

SEQ ID NO: 35636 - protein, 17 aa, Homo sapiens
LPGKPGKGLLAVLLERL

SEQ ID NO: 35637 - protein, 53 aa, Homo sapiens
LTLPESETEMRALGPGKRGEGERRKPENGEIKSFPWIIPSVNRDHKARASASS

SEQ ID NO: 35638 - protein, 22 aa, Homo sapiens
LPPGLEREISLLEEEALRTQGR

SEQ ID NO: 35639 - protein, 53 aa, Homo sapiens
LSLSSVSFWFSLSHSHSLPSSHILSVWVFLSLYVSLAQSLSLFIDPSLTLDLS

SEQ ID NO: 35640 - protein, 46 aa, Homo sapiens
TNILQCLRENGLIENVRGIHPFLKLEWLLFWVEKSGIRQGEQSGNG

SEQ ID NO: 35641 - protein, 73 aa, Homo sapiens
TAGYLTQNQSHWDTEKKKKGKKSEGVILACFYKNTVAIDSASVKMTQQTWRTKDSRAAPKLGKQLQQKLPSPW

SEQ ID NO: 35642 - protein, 30 aa, Homo sapiens
ILYLLWKIVRNKSLLWTTIFLWCLLRDLLS

SEQ ID NO: 35643 - protein, 60 aa, Homo sapiens
RKENSAGAPLASPRVTTMFSQIEDRSPAPLRSAEGCREHPHPFGHPCPGRARPSLSGLDP

SEQ ID NO: 35644 - protein, 52 aa, Homo sapiens
VVSALRSLGCSLLGFSCVAEEGEEKSSRQAQPSPARSPDGAAAGAARALTEP

SEQ ID NO: 35645 - protein, 58 aa, Homo sapiens
LEEGCPGLWMLLLGVVGAAVGRVAGSGGDSLGFRGLLFLVLLLSSLFPVWPWLTLKTL

SEQ ID NO: 35646 - protein, 54 aa, Homo sapiens
MTTDSAPRPQAEDREERTRESSHAPAPRLRREGASSDRPGCKLNTSLRRRLISG

SEQ ID NO: 35647 - protein, 45 aa, Homo sapiens
LLHLTPWDDSHLLESLYYLGFRRVNPLDYHMKLLPVSSPGMASHL

SEQ ID NO: 35648 - protein, 37 aa, Homo sapiens
KCLCSGGNVMDNTEPSQKPLWPPPGRPGCRGPLPGQP

SEQ ID NO: 35649 - protein, 103 aa, Homo sapiens
IGFHLARTFYVALLLWPMCCILCPQCATGPQRNVCLSNHGSGAVWQECKSGWRPGSPPGALHPPSRRTQQHDALRRSHCVQAPHLPGTALLRVPPSRNEGVHP

SEQ ID NO: 35650 - protein, 125 aa, Homo sapiens
VGCPASGLLLLLVLLRRPAASPSRAGGESGCGFVLTVIVAFPRLGGLRAGLLLLRERAVLSDPTPSRGSPHTLGCVRVEWDPRTRVSLDSYGAERTKIPDGKLNEWQKPWWSRRKSPKRSNFGYY

SEQ ID NO: 35651 - protein, 21 aa, Homo sapiens
MHTSGRGWGTTCLLVLLASDE

SEQ ID NO: 35652 - protein, 5 aa, Homo sapiens
MCPCA

SEQ ID NO: 35653 - protein, 18 aa, Homo sapiens
MQRVFLCLFCTLVNYVPP

SEQ ID NO: 35654 - protein, 103 aa, Homo sapiens
LIFWWVYQLLVECPCDSFRCQLDRIEGCLDGWGSTVSEKDHVFGGDCFMSEFQGTHSDHGSGIIKRDTKACSLSLPCKTTTQRLPSANQKQVGFPQTPDLPAP

SEQ ID NO: 35655 - protein, 10 aa, Homo sapiens
MSGPATWDRK

SEQ ID NO: 35656 - protein, 5 aa, Homo sapiens
MDADL

SEQ ID NO: 35657 - protein, 17 aa, Homo sapiens
TLADHTLPYRPQLPGAL

SEQ ID NO: 35658 - protein, 51 aa, Homo sapiens
LEMKHVERLCRGREAELKEHGRRPRPLGSRARSPPCAGLARAWNSGGPGAK

SEQ ID NO: 35659 - protein, 75 aa, Homo sapiens
RGPNKKREEMEITSPDLAFLSLFLFSPLPSDDWRVKGNPERGGEQRFEKMQECVWRRVKLPFKLWPPGTRCSAAG

SEQ ID NO: 35660 - protein, 10 aa, Homo sapiens
LGGTLSRPLR

SEQ ID NO: 35661 - protein, 42 aa, Homo sapiens
LAVALVSTHLPATLVIVATAGLDCQTGFSFYLEAFSEGSRSI

SEQ ID NO: 35662 - protein, 20 aa, Homo sapiens
LYSVLGMHVILTQWLLLTNR

SEQ ID NO: 35663 - protein, 72 aa, Homo sapiens
LCCCFLISSTKIFLSGVYLIGSVLSSPPPPPPSLRCVCRCRCCRRRCCCCSPRRYTNPRLFVSPLGSVEFLC

SEQ ID NO: 35664 - protein, 44 aa, Homo sapiens
LSEGAFFLASMALRGAPAGGGAVRWSPAFPGDTGPSFEVESFWF

SEQ ID NO: 35665 - protein, 46 aa, Homo sapiens
KKRNQKRMFVKFWLESRAGSVKKVLASPSPSAMILSFLTPPSRASC

SEQ ID NO: 35666 - protein, 82 aa, Homo sapiens
ISLGPSLLLFLSLDARLLRTPSPGGPAACELTEGLRLGEWVSPRPCPCSRPWPGPWLSPLCAEIVSLCGYSGVETAGSVTAS

SEQ ID NO: 35667 - protein, 49 aa, Homo sapiens
ISLGPSLLLFLSLDARLLRTPSPGGPAALLPTLTSRRPWPPSQTGSYSC

SEQ ID NO: 35668 - protein, 33 aa, Homo sapiens
ILLTHTMSFVWTIRQKGWLVKVAVVWKFLPALL

SEQ ID NO: 35669 - protein, 106 aa, Homo sapiens
LGALSGLSLICRRSPGGLLGCLLLPAGAGPPPSLVIRGWTSWEKELSVVFGGRDSPLLLGKKPDLPASWHLSLLLAPLCLASACILSVLRPLGVPCWPGSCVLRTR

SEQ ID NO: 35670 - protein, 18 aa, Homo sapiens
IHQNHSWDISHGSDSCTQ

SEQ ID NO: 35671 - protein, 45 aa, Homo sapiens
RKKQASDLIFHSSFLCLVLTVFVYFKGEKTRGTKPAGSIHHRGWF

SEQ ID NO: 35672 - protein, 104 aa, Homo sapiens
IKRFSCSHCWQMIEPGFESRQPGSRPCALNSRFASRTESYERLAQCLVLSRHSDSSIKEHCVHAEVHSTWSETACVRFLIPFITGCVISNKKTEEPAGRGSSRL

SEQ ID NO: 35673 - protein, 75 aa, Homo sapiens
LTSTDLYLWSFLYCSRDTVFFLCSSNPMGNITEVKCNSHHVISRAHTNKQHDLLLNIELDHLAEVVFARFLCKGE

SEQ ID NO: 35674 - protein, 36 aa, Homo sapiens
LKDTVLRCRSIFEVHSWIWRRTPNGYLHRGFAKGAH

SEQ ID NO: 35675 - protein, 109 aa, Homo sapiens
RGTEEEGGLSPGERGEGSARDRVMQVQTGRSLPALQPPAAPRQAKGGRAGVGREREAARLERAVRPTPAASRAPALTLRGPAHCEPGRAPRWQRLRAVLGRRWREPCAA

SEQ ID NO: 35676 - protein, 69 aa, Homo sapiens
MQMPPRSSNSGPQRVINCCSLDPRVLTAQNSKEETRSRAPSSSSPGWMRPAPDCFRLSRLLKLRADKRH

SEQ ID NO: 35677 - protein, 70 aa, Homo sapiens
LAAGPAAAAAAAAEGMSPGRARRLPQATARRGTPSRAHRSTARTPAPCGTRLRSLEAVSVIRMHWAPRSW

SEQ ID NO: 35678 - protein, 25 aa, Homo sapiens
IPLILQRNTAVRCASFQQERFLHLL

SEQ ID NO: 35679 - protein, 39 aa, Homo sapiens
VYLSCSVLRGAQRTSLPEDRFFVTGSSNLAVDTLVACIG

SEQ ID NO: 35680 - protein, 11 aa, Homo sapiens
LLAPRPQRRGN

SEQ ID NO: 35681 - protein, 56 aa, Homo sapiens
VRGNRKWAAAAAGPLAETAAGAGPRDAGTGRGPPERGKDAGRRSGFKDATSCSAVS

SEQ ID NO: 35682 - protein, 43 aa, Homo sapiens
LLLFVYFLLLPRRRRRHHEGNRALAGRAVRQPNRRQVLGGDQR

SEQ ID NO: 35683 - protein, 14 aa, Homo sapiens
ITGGMENAVAVKGR

SEQ ID NO: 35684 - protein, 24 aa, Homo sapiens
TRARGVGDLELENPPARVVVVDGE

SEQ ID NO: 35685 - protein, 13 aa, Homo sapiens
LRRGALFCSVLFF

SEQ ID NO: 35686 - protein, 59 aa, Homo sapiens
MKCFQDCLAPRGIIAEALDMNRSRQRMKLMVCMVTVLLPIFELLEYKLCLCLECPSQSD

SEQ ID NO: 35687 - protein, 27 aa, Homo sapiens
LSFKTIGTNLPLLKLKMVSSVPGFVKA

SEQ ID NO: 35688 - protein, 32 aa, Homo sapiens
KMATSTFQFQCLVFMAIMTIPQGQMHFVPWTF

SEQ ID NO: 35689 - protein, 18 aa, Homo sapiens
LATLLLRLLLSLGTGCQR

SEQ ID NO: 35690 - protein, 15 aa, Homo sapiens
ILMHLMWMFMVQTGI

SEQ ID NO: 35691 - protein, 86 aa, Homo sapiens
TATLLCLLSATALLCSLGHPRPHLLRLPDLPSFPAFLWIPASGHPSPPSLQGPLLVSLLLEPLPPPPSLQNFSFTPHPPPLPPFLF

SEQ ID NO: 35692 - protein, 53 aa, Homo sapiens
LPLRAPLSLGPFRTLFAHKLPKKKEPTCWYCWLVSLWSTSLLLLCYLLAPLPM

SEQ ID NO: 35693 - protein, 52 aa, Homo sapiens
LGPFRTLFAHKLPKKKEPTCWYCWLVSLWSTSLLLLCYLLAPLPMSGWFPIR

SEQ ID NO: 35694 - protein, 32 aa, Homo sapiens
IFSFACIIRVSTPLLSFLATLLQSSTNYPCPG

SEQ ID NO: 35695 - protein, 23 aa, Homo sapiens
LELELELRIRSPGSLCHLASSAN

SEQ ID NO: 35696 - protein, 35 aa, Homo sapiens
LVRSSALGSFVSGSGLALCPRVFVPLRSALPGQEP

SEQ ID NO: 35697 - protein, 23 aa, Homo sapiens
VKLAGTVPVIFLGLFGVLLKGGD

SEQ ID NO: 35698 - protein, 64 aa, Homo sapiens
MSFTYIWWTQQGRMSTAFCPIHSSLGSMVMCLCILSPLCIASKSLRVCTKSYMKAMGKPGCQWF

SEQ ID NO: 35699 - protein, 20 aa, Homo sapiens
IPNSFLFSFLDLCYFFVETC

SEQ ID NO: 35700 - protein, 85 aa, Homo sapiens
MSTSLARSSTAVMAAGPTAAAAPMSTVSPAACSPTSNFSWSASSTGQPWHSRTSSWQSKITLSCAWPNAGPHLRACSMRTPTGTP

SEQ ID NO: 35701 - protein, 50 aa, Homo sapiens
LGLLLLLTTTTTTGAASAVPGVSSCSGHTAPGDCSSSNQNLGLTGTLAPK

SEQ ID NO: 35702 - protein, 19 aa, Homo sapiens
LPTDFVQLQISNLSPLSLL

SEQ ID NO: 35703 - protein, 47 aa, Homo sapiens
LVASLWFLSGACNPWFTSFQVLAPSSHGSQSPSVNSLDLMSWVQLGH

SEQ ID NO: 35704 - protein, 22 aa, Homo sapiens
RPWRSWSCTVTCCWLGLALSSL

SEQ ID NO: 35705 - protein, 74 aa, Homo sapiens [sequence omitted]

SEQ ID NO: 35706 - protein, 38 aa, Homo sapiens
MCRFLTWVHWMTLRFGVLLIPSCRLHCCDPSSSPKDAS

SEQ ID NO: 35707 - protein, 24 aa, Homo sapiens
IRIWRERGWSLLLPLCSLFRGLWW

SEQ ID NO: 35708 - protein, 27 aa, Homo sapiens
LGSGIRSAPAVVAAAAAAIAAGQSLAP

SEQ ID NO: 35709 - protein, 50 aa, Homo sapiens
ILFFSHLLAFFFLPPWLPSPNPAIPSSTPVLPSPAILSHPTCNLLSFAPP

SEQ ID NO: 35710 - protein, 73 aa, Homo sapiens
MGPSWMWMRMTLRRLMLPPATVWRIWPHWCTSMSPASCTPCASAMALACCTRMLAPACWFLAPVGPLLCTLRR

SEQ ID NO: 35711 - protein, 39 aa, Homo sapiens
LLTSQWGMLFTLQLTLGLPGALSLGCLMRDVQGFSWVGV

SEQ ID NO: 35712 - protein, 31 aa, Homo sapiens
MIAWLTAGLVSVCCCTLWRFSLELLPEKAPL

SEQ ID NO: 35713 - protein, 97 aa, Homo sapiens
MVSFCVSCLTTCYPMPSTCVRSTCAPRCPSSCALRTLEPSCPPAVRSSASSGASSSKPLTSSMCRILARSSTPCLLCPGPRSPRTGGSCPSPPRRRV

SEQ ID NO: 35714 - protein, 86 aa, Homo sapiens
RPRRGEDPGNSPFHPNPDRQPSRALCSTPRMHRLWIGPAFFLMTSLSVSGAVIPRNGGPGGVSSGPCLLQLLCGQAGSSTIRKIPS

SEQ ID NO: 35715 - protein, 28 aa, Homo sapiens
LSWMLSVLRFTMRIVFPALAPDPYYSVN

SEQ ID NO: 35716 - protein, 26 aa, Homo sapiens
MRRFVAASGVWRGSGSVLRSWLPEAK

SEQ ID NO: 35717 - protein, 13 aa, Homo sapiens
ISCIGLIIFNYMA

SEQ ID NO: 35718 - protein, 18 aa, Homo sapiens
MRPLLRICAYLVPLLSTS

SEQ ID NO: 35719 - protein, 50 aa, Homo sapiens
MGVKEDIKQASRVEPATPGWWGRGTRPGRGKPLGQWSLVKQSCQPSMDPN

SEQ ID NO: 35720 - protein, 204 aa, Homo sapiens
MRCSLQSGAWLNGLTRKRDFRVRPLLYQDSILGVKQDNAEGSVQQPCKGFSSALGRWAVPLPGPPGPPGPPLPEGKHEQPLTWEWRLLRGNCLYTSNVALWDLSGAPTHAGRVFMAFPGQSDTKMQWPEVPALPLLSSLCMAMVRKSSALGKEVGRRVKEMVMLVAPFRQSSSLSRTFSSRKVVKAHASLHGARLSPLSRNIRG

SEQ ID NO: 35721 - protein, 66 aa, Homo sapiens
MVCNSDFAHRSTVPPSAHPFTLTPTLSLNTFIIVRRGRWDFGRSAAATASGGLIFIFALRWLKAFI

SEQ ID NO: 35722 - protein, 63 aa, Homo sapiens
MPLDNFCLLKRRGLSPHRPMVWRLNQLSDYYSRVRLMTLQEPGRSKRNLRELRTQSLMMRKKC

SEQ ID NO: 35723 - protein, 42 aa, Homo sapiens
MDVPPGRMKAERVASPPQGCSLIFLFSLASQHSAFCIHHGVW

SEQ ID NO: 35724 - protein, 18 aa, Homo sapiens
MEALLGFHIWKTANSRSM

SEQ ID NO: 35725 - protein, 28 aa, Homo sapiens
MILRLFLSHVLQHRIGDFRKSFSHCDSI

SEQ ID NO: 35726 - protein, 38 aa, Homo sapiens
RRSRMRPAAVAPASAGAAAAEAAAEAAATAAPPPADLD

SEQ ID NO: 35727 - protein, 34 aa, Homo sapiens
IPFFRLPVARRVRAAAAAARAAVAAAAAAVTCPA

SEQ ID NO: 35728 - protein, 30 aa, Homo sapiens
MAILGTAGRVVLEAGCTILMGALQWGFPVS

SEQ ID NO: 35729 - protein, 52 aa, Homo sapiens
IWLVPVFLLPAKLGFRPSADSVPHVLGALDIPGSGAYEALWPKVPEVLLVPI

SEQ ID NO: 35730 - protein, 117 aa, Homo sapiens
LMAAAASPSPDPAGRRVSRPKPAGPGRNPRRAAWTQRLWVAAGVACREAWRPLERRAAEGVRAWRAREGGLGTQAGSAASSGHGAARSGSRVTTLSPLGETYLVLTTTDKGLNGPGR

SEQ ID NO: 35731 - protein, 33 aa, Homo sapiens
VCVPLPLLPPPLLLLLAPSLHQPEALCFPSWIC

SEQ ID NO: 35732 - protein, 16 aa, Homo sapiens
LLLLLLVAPLQMYCCP

SEQ ID NO: 35733 - protein, 25 aa, Homo sapiens
TARRPRACTSLAVSSPSASGAFSVE

SEQ ID NO: 35734 - protein, 30 aa, Homo sapiens
KSRGPAVVAAMLGAAGPAAAACVPGAEQCR

SEQ ID NO: 35735 - protein, 11 aa, Homo sapiens
IPFPQPGTEPT

SEQ ID NO: 35736 - protein, 35 aa, Homo sapiens
LNFCTKISRNSWMPLLSLAFLFPSSRAICSSCSRA

SEQ ID NO: 35737 - protein, 14 aa, Homo sapiens
VCLPGCCAAGCECL

SEQ ID NO: 35738 - protein, 52 aa, Homo sapiens
KLGFFKLGLPFSVSPWAAESQKILSSLYKAAGVPSFFPRGCFWLQLHEIPMV

SEQ ID NO: 35739 - protein, 11 aa, Homo sapiens
RSVIQWLLSLA

SEQ ID NO: 35740 - protein, 30 aa, Homo sapiens
VYLLSSAVMGLMPVAMALMKQVAAQTPSLA

SEQ ID NO: 35741 - protein, 10 aa, Homo sapiens
MLVIWILKMT

SEQ ID NO: 35742 - protein, 16 aa, Homo sapiens
LVICGGMILLNWIIGD

SEQ ID NO: 35743 - protein, 30 aa, Homo sapiens
IWCVCVCVCVCLGWVYDVSAEHAEVLAGVS

SEQ ID NO: 35744 - protein, 24 aa, Homo sapiens
IPDTVAFGNNKNCSWAWWYTPVDP

SEQ ID NO: 35745 - protein, 30 aa, Homo sapiens
MARMSGRSAVGVFTCSKGTVAPARPSSSTA

SEQ ID NO: 35746 - protein, 21 aa, Homo sapiens
MGGGGHGLSLYAVWKVESSSS

SEQ ID NO: 35747 - protein, 51 aa, Homo sapiens
RLGLGFLQLAPALPAPAAHPPRGRCRNRVTITAWWCSGRAAWARARWCCAS

SEQ ID NO: 35748 - protein, 70 aa, Homo sapiens
IGGRCQAWRPPGALAWCLWLVPWASLWSCSLEAVQQKSPPGLSKNPRTRSACRGVWPLSCVRPRVTPSHE

SEQ ID NO: 35749 - protein, 91 aa, Homo sapiens
MLRYRGSGSLLCGPFLQSDFALLSSPHSPLHLPHQKREVGATTALSAQAPVSCFRVRGKEDPAKAATTIFPWGHGLGRQPGVQPPVVARAR

SEQ ID NO: 35750 - protein, 11 aa, Homo sapiens
ILSAILGLCVS

SEQ ID NO: 35751 - protein, 12 aa, Homo sapiens
TAVLVLNLRLCL

SEQ ID NO: 35752 - protein, 39 aa, Homo sapiens
LERNNPQKMQKTGHQSCCLFMVVILPRYLISPGIPMNLG

SEQ ID NO: 35753 - protein, 55 aa, Homo sapiens
LPTLVTYCSAGLFPLGSLALFLPQHDFYRDAVVEASRRSPAPVEKIPLVTPTLPP

SEQ ID NO: 35754 - protein, 17 aa, Homo sapiens
LGFAALAALVVQHLRSG

SEQ ID NO: 35755 - protein, 22 aa, Homo sapiens
KSDQTGCFSAVSNMAGRFNRHG

SEQ ID NO: 35756 - protein, 22 aa, Homo sapiens
VRFFLLCVLILAIFLNVGNSTA

SEQ ID NO: 35757 - protein, 34 aa, Homo sapiens
IEGSGMRRTSRDGKPRREGPSLVTWRAGAAADPL

SEQ ID NO: 35758 - protein, 36 aa, Homo sapiens
RCWGLRLSLSLFSAPPGIPLLTWVFYTPAWLPARPP

SEQ ID NO: 35759 - protein, 41 aa, Homo sapiens
TLAAQHRGARIGRFVYRLLLLRKLVSVKVILAQMSNKYAPS

SEQ ID NO: 35760 - protein, 28 aa, Homo sapiens
MMITMVMIITTIVEAMKIPTTAMMMAMQ

SEQ ID NO: 35761 - protein, 22 aa, Homo sapiens
RGTSILLWMMTILNPQMQNNWI

SEQ ID NO: 35762 - protein, 52 aa, Homo sapiens
LWVWTDLHVLLWGFYSLWIVKTAERDLQSSHISIIKKYWSSWKKSKIYQSNQ

SEQ ID NO: 35763 - protein, 15 aa, Homo sapiens
MPMRASFLLLISIIS

SEQ ID NO: 35764 - protein, 17 aa, Homo sapiens
KRGTLLMGICTAMVLGE

SEQ ID NO: 35765 - protein, 50 aa, Homo sapiens
LAALLSFLGLSLPPGLPQIHDVQFSGAGAGCAGHYLPQVLLPRGRQVQAE

SEQ ID NO: 35766 - protein, 18 aa, Homo sapiens
LDWQTQVQWLLCFGLMLN

SEQ ID NO: 35767 - protein, 40 aa, Homo sapiens
LMTVVTALLLIILQTRGCSQFGKAVGPAASAGTLDLSGWR

SEQ ID NO: 35768 - protein, 27 aa, Homo sapiens
RLSGWRRRLPLRCLAITFSIPAAFCPG

SEQ ID NO: 35769 - protein, 17 aa, Homo sapiens
RNFRHMVLMRIQCLFAI

SEQ ID NO: 35770 - protein, 37 aa, Homo sapiens
TKLRTSSPEAAGLRPAAAAAAAAAQFLEQIQFAFLDL

SEQ ID NO: 35771 - protein, 32 aa, Homo sapiens
ILLLVRDAVSCVIPVIALQALSPSTWSLCPGR

SEQ ID NO: 35772 - protein, 36 aa, Homo sapiens
TTSSVRALTSGWVAAFSMPPGWAALVTTRWDDKLSH

SEQ ID NO: 35773 - protein, 37 aa, Homo sapiens
TTSSVRALTSGWVAAFSMPPGWAALVTTRGCTIAIWS

SEQ ID NO: 35774 - protein, 22 aa, Homo sapiens
IERTSLKIWLLLLVVQCLEKRD

SEQ ID NO: 35775 - protein, 26 aa, Homo sapiens
MRRHSEKAQSMNQNVDCHHLLNLLSP

SEQ ID NO: 35776 - protein, 15 aa, Homo sapiens
LPRPTTCLVAFSLCL

SEQ ID NO: 35777 - protein, 31 aa, Homo sapiens
LFPRLFQTFVIAVVSLVILPRIVIFRRMVSI

SEQ ID NO: 35778 - protein, 37 aa, Homo sapiens
LFPRLFQTFVIAVVSLVILPRIVIFRRMSWPVSFPYC

SEQ ID NO: 35779 - protein, 34 aa, Homo sapiens
KFLLLVWVWCTYMAVTYTSGDIQKLLKNGSPVSD

SEQ ID NO: 35780 - protein, 58 aa, Homo sapiens
LRWPWPWGDRLMKSFETCLCLAMWDLTASLTSWSTSLLLKDSVSTSFVLVRQALANPR

SEQ ID NO: 35781 - protein, 60 aa, Homo sapiens
IISGSLHFICLMEILSDIQQPCKWSGLCQTATNSCRTISEAAYPRSLMWKDMAVTAWGSK

SEQ ID NO: 35782 - protein, 12 aa, Homo sapiens
MGKHFLPLTAST

SEQ ID NO: 35783 - protein, 43 aa, Homo sapiens
MDECTHSSWVSWLLFGVCYTPVLCPVSSEKFHVCDKLGGRVAS

SEQ ID NO: 35784 - protein, 37 aa, Homo sapiens
VILHRGLCIFMIIGSKMLIQELKIGSSCPRLCHKPSS

SEQ ID NO: 35785 - protein, 15 aa, Homo sapiens
IALAALALGASIMNC

SEQ ID NO: 35786 - protein, 10 aa, Homo sapiens
LVCVRPWPCG

SEQ ID NO: 35787 - protein, 19 aa, Homo sapiens
MKHMYKLWRASTQILTLMM

SEQ ID NO: 35788 - protein, 18 aa, Homo sapiens
MPEIWPLGQGMPAARDSS

SEQ ID NO: 35789 - protein, 24 aa, Homo sapiens
VKNLVVVLLFIALQALGELQYLLP

SEQ ID NO: 35790 - protein, 34 aa, Homo sapiens
MKRTRLFSSSSTSPSQQTWAYSLSYILCSKMYML

SEQ ID NO: 35791 - protein, 29 aa, Homo sapiens
MLRHSSCKVAIFVPVVVCTLSPGIDSSPS

SEQ ID NO: 35792 - protein, 16 aa, Homo sapiens
MFLSFLMNQILILAFL

SEQ ID NO: 35793 - protein, 30 aa, Homo sapiens
VIALVLKIVIFFTALMHIDLKDSKKQNVHQ

SEQ ID NO: 35794 - protein, 25 aa, Homo sapiens
VIALVLKIVIFFTDLKDSKKQNVHQ

SEQ ID NO: 35795 - protein, 33 aa, Homo sapiens
IRGGGWAALLCALRLTALLSPVSFVAGSFCAGA

SEQ ID NO: 35796 - protein, 36 aa, Homo sapiens
LCLCILKARRRGEQNQLDPSITVGGFNFSFFLVIFF

SEQ ID NO: 35797 - protein, 39 aa, Homo sapiens
LIGSLERKEALALLLLMTMILWIKSYCRNTIPSMVIMQK

SEQ ID NO: 35798 - protein, 36 aa, Homo sapiens
LFLNHGRRVDAAAFGVVLPLGPSARLLGRELTSAFL

SEQ ID NO: 35799 - protein, 18 aa, Homo sapiens
VTQFLAPSRRSVDGWVAE

SEQ ID NO: 35800 - protein, 23 aa, Homo sapiens
MLFLKVCLCLFKSYSMASWEALR

SEQ ID NO: 35801 - protein, 28 aa, Homo sapiens
MLSSSSLSSSSAVVGTSGESTPGTLLHW

SEQ ID NO: 35802 - protein, 30 aa, Homo sapiens
MLSSSSLSSSSAVVGTSGESTPGTLLHCRS

SEQ ID NO: 35803 - protein, 11 aa, Homo sapiens
IKLRARLLALT

SEQ ID NO: 35804 - protein, 61 aa, Homo sapiens
VQWPSVRMPRAAATAAAAAPAAVARVRAAAAPGPGERQSMEDTRMGGKADSQELHSSRGLW

SEQ ID NO: 35805 - protein, 14 aa, Homo sapiens
KKMILVILEWMIVR

SEQ ID NO: 35806 - protein, 10 aa, Homo sapiens
TDSITRNLRP

SEQ ID NO: 35807 - protein, 28 aa, Homo sapiens
RVAPDMIIPMQGVVAHMVILVDLLLLHK

SEQ ID NO: 35808 - protein, 17 aa, Homo sapiens
MGYSLHKRVVIIVFVDA

SEQ ID NO: 35809 - protein, 8 aa, Homo sapiens
LLFGLFLA

SEQ ID NO: 35810 - protein, 18 aa, Homo sapiens
ILSATTQKHEFFCFFCVG

SEQ ID NO: 35811 - protein, 26 aa, Homo sapiens
RKNRPPRIRLQLLGLVLLAWPVPSVS

SEQ ID NO: 35812 - protein, 14 aa, Homo sapiens
TVVRLGTMGEQLCS

SEQ ID NO: 35813 - protein, 12 aa, Homo sapiens
VIFCAVFLLDVS

SEQ ID NO: 35814 - protein, 22 aa, Homo sapiens
MARALLVRCFFSLAYSSQLFGL

SEQ ID NO: 35815 - protein, 16 aa, Homo sapiens
TFTCPCLTTLTAMMWL

SEQ ID NO: 35816 - protein, 32 aa, Homo sapiens
ICLVGFLAFYRKAPLMMFVANDRLFSLCKNYG

SEQ ID NO: 35817 - protein, 15 aa, Homo sapiens
VISASPFATYLLLVS

SEQ ID NO: 35818 - protein, 11 aa, Homo sapiens
KRFFFILASIL

SEQ ID NO: 35819 - protein, 19 aa, Homo sapiens
LLLWQFFCFWSIKLWKPTK

SEQ ID NO: 35820 - protein, 101 aa, Homo sapiens
LGSFSWFCLFYFSRGAEFRNKNICPSEFQPEGGVLSRRIYSMRWRPASRERTHMGQEPQMTPPTMVVKMLATHRCWEFFLPLKPQNDFRLPGLTRSTSKYL

SEQ ID NO: 35821 - protein, 35 aa, Homo sapiens
LQPRELSRAKLGVAVWMASSEVGTCLSFPAPEMGL

SEQ ID NO: 35822 - protein, 84 aa, Homo sapiens
IVSLWVLARITPSEVTPEGGLEGESNERERERKEGREGGRMEGCMDLDVWVPFLLPWQKLTHPSVSIQNGISSWAPSPESPASR

SEQ ID NO: 35823 - protein, 27 aa, Homo sapiens
KLRARFLPRELMCVLSTLSTLRAEIAS

SEQ ID NO: 35824 - protein, 18 aa, Homo sapiens
ITSSWCSRLAALTFLLAG

SEQ ID NO: 35825 - protein, 91 aa, Homo sapiens
LARPLLAALRLRLLGLGLGFISRLTSSQSRASSVGFMSLFDENDRRYQKVAIKDLFILLIKPLISQNVCQCQPQRVRPVLSLQDAPSDCQG

SEQ ID NO: 35826 - protein, 12 aa, Homo sapiens
IGLLVWTYYMDQ

SEQ ID NO: 35827 - protein, 19 aa, Homo sapiens
LRSAWRWPVPGWWAAVVLS

SEQ ID NO: 35828 - protein, 36 aa, Homo sapiens
RYRMRRKTRNLAFLWAITWASPSQLTTRSKLENEIP

SEQ ID NO: 35829 - protein, 26 aa, Homo sapiens
MMLKRKHVFSSSCIFMWSCSLPNVED

SEQ ID NO: 35830 - protein, 109 aa, Homo sapiens
MTTRARRRRKRRTWSPRRRRRRTATPRRPRILRTTRRMRWKRTTMTPIIRRRWKTTTTTPVTARKAASGAIVPTAALQVGENQEYIGLVLLYWKKKTSRPLNFPSPLRI

SEQ ID NO: 35831 - protein, 65 aa, Homo sapiens
IFVRPPRFVLGARALASLASRRAAPTPRWRRPRLPRRRPPRAAGPCPPWCPGQSPRARPWTPSWR

SEQ ID NO: 35832 - protein, 64 aa, Homo sapiens
LDSCSLRRRAGDGVVPREGAKGDVPAASSRPSPERLQEHAPSPGAGRRAARESCSARTQRQGAA

SEQ ID NO: 35833 - protein, 12 aa, Homo sapiens
LVLPSQVSANAT

SEQ ID NO: 35834 - protein, 40 aa, Homo sapiens
INWSPARLQSLRMLSCLMSSASTKPCWALSGMNAIVGIFF

SEQ ID NO: 35835 - protein, 163 aa, Homo sapiens
MWLVFHRPHPRPSWPLRAALGFGRRQSSLRCFPVLPSARPYVSANPTLRGGRLRQDPESETGVGDLPDPVTTLVLLHNRLPLAVTVGCLPSRCPTEKRAPPWQGLLHCLAVDVEVGQESEEKTERREVEPTSEKRGGKFRWEVDGSEEFEQTPTVKESDLSKQ

SEQ ID NO: 35836 - protein, 57 aa, Homo sapiens
LGLQFPSLSSMEFFIPTSVDLKILPLSACLGSAVSSLPWFSDDACNNAMRFAHSWRK

SEQ ID NO: 35837 - protein, 22 aa, Homo sapiens
RVPAMPKKLRSGLLGCLELVGL

SEQ ID NO: 35838 - protein, 18 aa, Homo sapiens
IKNRGGCLLLLVLVRRQM

SEQ ID NO: 35839 - protein, 22 aa, Homo sapiens
IALFSALPLALSDGNGEARSSL

SEQ ID NO: 35840 - protein, 17 aa, Homo sapiens
VVLLLVAVRLHTLLSCP

SEQ ID NO: 35841 - protein, 13 aa, Homo sapiens
VALIIANIFSLGY

SEQ ID NO: 35842 - protein, 16 aa, Homo sapiens
IWLLILAGISGLSAGP

SEQ ID NO: 35843 - protein, 18 aa, Homo sapiens
LDWDRRTHILATCLWLMC

SEQ ID NO: 35844 - protein, 14 aa, Homo sapiens
ILSSSCRKILLLLL

SEQ ID NO: 35845 - protein, 18 aa, Homo sapiens
IWICAALLVTRKTLVRTL

SEQ ID NO: 35846 - protein, 96 aa, Homo sapiens
IGVLRKVRLAGTWLWVGWTGCRTECPAVGRSMRQSDAHPGAQHRSNCRRHCLRLCAARGCVPEQEARFLGLELPFLASGKSPRTESKGQILSVSAV

SEQ ID NO: 35847 - protein, 137 aa, Homo sapiens
MSVPSGGAGAVLRAPACAPRAGLGLFQDAHVRTETPDRGSSRLERPAVSRPARPGFTVFHHLRLSCDRPQLCRRGRRYLLLQLPEPLPGLVQDHGLVAQGCLVCELQLHALQERRNFLFSGNPTTQLVSHWCCLPIP

SEQ ID NO: 35848 - protein, 31 aa, Homo sapiens
VAVMRHSDKGQEGDLLGGHAVMEARRNEGLQ

SEQ ID NO: 35849 - protein, 22 aa, Homo sapiens
ITPLFGLNLAWLLVLRTLERWC

SEQ ID NO: 35850 - protein, 15 aa, Homo sapiens
ITLRLLLVSIHMNWL

SEQ ID NO: 35851 - protein, 32 aa, Homo sapiens
ISFCLRLGLLFLFADETGFHHVGQAGLQFLTS

SEQ ID NO: 35852 - protein, 8 aa, Homo sapiens
IAYFGILI

SEQ ID NO: 35853 - protein, 135 aa, Homo sapiens
MKSGGGRSYRPKNCDWHTQGALIMVGLCPMLTRLALAWPSSRAPSTHLWIHLGALGTMGWWNGCSEILEEWCPHFADTPATLTALPIVLPTYLLPQSLAGEGRWPGAISLQRRGSCFDYHLHLTGQALTLPFIQV

SEQ ID NO: 35854 - protein, 26 aa, Homo sapiens
RTWSLEEYLVCFSSCLACLCSSSCCC

SEQ ID NO: 35855 - protein, 43 aa, Homo sapiens
MMDVPPGRMKAERVASPPQGCSLIFLFSLASQHSAFCIHHGVW

SEQ ID NO: 35856 - protein, 11 aa, Homo sapiens
VAKWMVCLFAV

SEQ ID NO: 35857 - protein, 24 aa, Homo sapiens
MTRSNGFCDAVWTLLSLNSMCVLL

SEQ ID NO: 35858 - protein, 32 aa, Homo sapiens
ICRIPQDLCIKTCSVWLLMKLIVSWMWGLKRN

SEQ ID NO: 35859 - protein, 23 aa, Homo sapiens
LKLTLKMILTLMYILEKQRLLLF

SEQ ID NO: 35860 - protein, 27 aa, Homo sapiens
LPTQWKAPLVGRLLSLALLPVLVWPSI

SEQ ID NO: 35861 - protein, 22 aa, Homo sapiens
RFSSLSFWISLFLVLSTKDPFL

SEQ ID NO: 35862 - protein, 42 aa, Homo sapiens
LGHMPRPWRLSHASCVTMLALMPQTFSTSCGLGMPRGVHGME

SEQ ID NO: 35863 - protein, 19 aa, Homo sapiens
LMTAIWVILWLSEISMVMA

SEQ ID NO: 35864 - protein, 28 aa, Homo sapiens
RQCSIFSGLTNIIITLCCISFIMILMDQ

SEQ ID NO: 35865 - protein, 12 aa, Homo sapiens
MQCFWILLIPVA

SEQ ID NO: 35866 - protein, 22 aa, Homo sapiens
VVLIKNLVWTLALFAFYKPNSI

SEQ ID NO: 35867 - protein, 24 aa, Homo sapiens
IPLSQKILSEQLCTLFLACASGWC

SEQ ID NO: 35868 - protein, 30 aa, Homo sapiens
KNFLRCSFFSSSPSWLTSAISGPTQMSLRK

SEQ ID NO: 35869 - protein, 12 aa, Homo sapiens
LETAHNFLLLLF

SEQ ID NO: 35870 - protein, 30 aa, Homo sapiens
LLEGSNQPAPLALLLVCAAFQRENSCSKRK

SEQ ID NO: 35871 - protein, 17 aa, Homo sapiens
LPSMTFILMTFLSTLMP

SEQ ID NO: 35872 - protein, 18 aa, Homo sapiens
LDILSMIIQYLLMGSLFS

SEQ ID NO: 35873 - protein, 29 aa, Homo sapiens
LGKNRIWSCHLCCACLIGDVHCLTPFKSS

SEQ ID NO: 35874 - protein, 11 aa, Homo sapiens
LALMVLMVFLD

SEQ ID NO: 35875 - protein, 14 aa, Homo sapiens
MTLFWKMLLLQSAL

SEQ ID NO: 35876 - protein, 11 aa, Homo sapiens
LGVVFSLIFLF

SEQ ID NO: 35877 - protein, 66 aa, Homo sapiens
LHQSTVRFMKKNKLRTTLYVHLQMPQLMLVGCLSAFCDNEHMDFCLLNSVDPFSQLPGAWIFTSNC

SEQ ID NO: 35878 - protein, 32 aa, Homo sapiens
LWFLYFFFSLYQKVFFNGKKNNFLFSFTNEFQ

SEQ ID NO: 35879 - protein, 59 aa, Homo sapiens
LALFLSLQGALGGTGSSQILLLVYSYHLASVFLGNAAVLMHLVSFWSYSGQAFVTALWD

SEQ ID NO: 35880 - protein, 17 aa, Homo sapiens
LMNFYITVHVLCFAVIP

SEQ ID NO: 35881 - protein, 115 aa, Homo sapiens
IRAPRQLLRLPAGGPALARPASARCPAARTLPTLLSSPTLELPLCLSCCCAGAPTAERRLQSRRDAPTLRRRWRRRGGPGTLRHGRDDPLQGRGRSSEGKDLRRDQSSRRGRRFS

SEQ ID NO: 35882 - protein, 10 aa, Homo sapiens
IWLNAILWIF

SEQ ID NO: 35883 - protein, 35 aa, Homo sapiens
KIISFVLLLLMLLLLYLTWVFYNVVFNFNCQSLNM

SEQ ID NO: 35884 - protein, 29 aa, Homo sapiens
MMERSMMILLMAASMTMTSTQLWSFCCVH

SEQ ID NO: 35885 - protein, 36 aa, Homo sapiens
LPPLGLSSSSLFLCSQSSIIDPTTCALKTECSISEL

SEQ ID NO: 35886 - protein, 76 aa, Homo sapiens
VKSVAFLLSSSRSLVVLQMPHASRGPGSPLPSPPLLAGPRAGSCGKEWRVGRWPRGWPGARPAPVVSGGTALPSRG

SEQ ID NO: 35887 - protein, 28 aa, Homo sapiens
MEVLGCGAAGCGCAQGDGMESLSWHSYK

SEQ ID NO: 35888 - protein, 40 aa, Homo sapiens
LLFKTRKRRRKRKKRKMLGNIYLTCSTARTLASCCYSCKY

SEQ ID NO: 35889 - protein, 84 aa, Homo sapiens
LESDIRKPARRKIQTTNPDFLLLLFMSVPVVSAPPFCPPAEGSRDGRPKASVARPAAVHEHHSPRDCGHLPDVLRSSLGGWQPH

SEQ ID NO: 35890 - protein, 162 aa, Homo sapiens
LSLVGLLLYLVPAAAALAWLAVGTTAAWWGLSREPRGSRPLSSFVQKARHRRTLFASPPAKSTANGNLLEPRTLLEGPDPAELLLMGSYLGKPGPPQPAPAPEGQDLRNRPGRRPPARRRAPHRPPRRPIAFTTFTPLSPLLFSDPPGGLPHGIVGLYQIGL

SEQ ID NO: 35891 - protein, 31 aa, Homo sapiens
MAPLRRLTVWRVGLRLGPAGAAGGPGEASSV

SEQ ID NO: 35892 - protein, 141 aa, Homo sapiens
RRRGPGSGAKRPRCATSWGSSWPAMAATPRLWSSTGRSCSFGSALTTLWAVPWPTARSESAWPRWRTTRLPCSTSTSTWSWHIPCATTRSCRGPGPPSAAPTWTSMTTASRGMLCCRHRLPLRRAWLLWMRSWRGHWPRES

SEQ ID NO: 35893 - protein, 28 aa, Homo sapiens
LLLLMCTARAMLTGTSSQKICCLMNIIN

SEQ ID NO: 35894 - protein, 33 aa, Homo sapiens
ISFFYLFLLAPKLPGSHFLLLEFNQILPTPAPS

SEQ ID NO: 35895 - protein, 12 aa, Homo sapiens
IWCTLIPVTFGL

SEQ ID NO: 35896 - protein, 25 aa, Homo sapiens
ISPLEVMSLKMMSRKLQERISPQNQ

SEQ ID NO: 35897 - protein, 20 aa, Homo sapiens
MMMSNVMLMLQLQPLLAQPL

SEQ ID NO: 35898 - protein, 48 aa, Homo sapiens
LAAVATCLVASAAVGSWGDGGAGAGLAVQESQPWPPPSRIWSIWHLCT

SEQ ID NO: 35899 - protein, 19 aa, Homo sapiens
MKYLAWSLLYRKHSIISNY

SEQ ID NO: 35900 - protein, 55 aa, Homo sapiens
MGFGSLQALSAAARSAMVTWWSRDTSGAAVGGTRGERGRRLRPGTGCCHPSLPFL

SEQ ID NO: 35901 - protein, 67 aa, Homo sapiens [sequence omitted]

SEQ ID NO: 35902 - protein, 54 aa, Homo sapiens [sequence omitted]

SEQ ID NO: 35903 - protein, 29 aa, Homo sapiens
MCQARIALDRCNLRTAFILFSLILSHYVF

SEQ ID NO: 35904 - protein, 23 aa, Homo sapiens
MESRTLLLLFSGAVALIQTWAGP

SEQ ID NO: 35905 - protein, 88 aa, Homo sapiens
MTRHAKCVGIPAALATTRPAPRQDGGLNAAGSGGKLRSAFPQLLAASAPISAEDSGAPGTGRNYSAYLERRRDSDLPQSNPRAGTCCH

SEQ ID NO: 35906 - protein, 36 aa, Homo sapiens
MPRSRPPSQAPPAPPHPGLPAVLLPPPPLPASSTGP

SEQ ID NO: 35907 - protein, 45 aa, Homo sapiens
MLLLKTHLASIIFRVHPFWRDLAFAVASCGRVFLSFCSQAFYSGG

SEQ ID NO: 35908 - protein, 168 aa, Homo sapiens [sequence omitted]

SEQ ID NO: 35909 - protein, 124 aa, Homo sapiens
MGMKAACWRGRRTRRAGPLPSMLHPGPCAWAFSQWPPHSRTGHSPGRRLHGCRRPRGPWARQPLSTVARSGVLEPSGCLADKGRSVCPLLVLVEDPRSDVLGQSWSQTEPGVVCRAALGPGGCV

SEQ ID NO: 35910 - protein, 40 aa, Homo sapiens
MVSLKLIGRPLLPKLTHLWCTFVVNVLMLPISCGSPITSF

SEQ ID NO: 35911 - protein, 38 aa, Homo sapiens
ISRLGLLGTATLTVWFQTPVPGWIPAIHAPSLISRSSQ

SEQ ID NO: 35912 - protein, 35 aa, Homo sapiens
RMRPAAVAPASAGAAAAEAAAEAAATAAPPPADLD

SEQ ID NO: 35913 - protein, 19 aa, Homo sapiens
TAMKLVFFGGGFSIVLSMC

SEQ ID NO: 35914 - protein, 48 aa, Homo sapiens
VYMIVSHVQGEDRATRRVKVVEGNMACFPLQQGLPLQDREEELCHPCV

SEQ ID NO: 35915 - protein, 84 aa, Homo sapiens
LASMWPLQHISVASVSVVSFLCLAPHGFKSTRAGVETAHLALILSDWWFWPVSRYLSIGKAALRCGGHPDSHRLHSRNGSMRLY

SEQ ID NO: 35916 - protein, 112 aa, Homo sapiens [sequence omitted]

SEQ ID NO: 35917 - protein, 13 aa, Homo sapiens
ILMFRGLVLVHLS

SEQ ID NO: 35918 - protein, 15 aa, Homo sapiens
VLMCPLKMPGKQWLL

SEQ ID NO: 35919 - protein, 13 aa, Homo sapiens
TLLRSSVACVSLG

SEQ ID NO: 35920 - protein, 31 aa, Homo sapiens
LLLVRDAVSCVIPVIALQALSPSTWSLCPGR

SEQ ID NO: 35921 - protein, 15 aa, Homo sapiens
LCFFLFQFILNAYFS

SEQ ID NO: 35922 - protein, 32 aa, Homo sapiens
IKNLRWGKKALLSLTLIFCRYFVTQEDLIYSQ

SEQ ID NO: 35923 - protein, 27 aa, Homo sapiens
VARRVRAAAAAARAAVAAAAAAVTCPA

SEQ ID NO: 35924 - protein, 19 aa, Homo sapiens
VLLLLFTLLLGFYEGFVKS

SEQ ID NO: 35925 - protein, 53 aa, Homo sapiens
ILGSGITALMSQFCCHPALSMASQFPKSAWKMWGAPHRLANGKRMKIGLTSLS

SEQ ID NO: 35926 - protein, 13 aa, Homo sapiens
VDHFGFLFCVWQF

SEQ ID NO: 35927 - protein, 41 aa, Homo sapiens
MHNVKQCKSERCKIPIKELEADRCASDNSHLPTQEHSFHFP

SEQ ID NO: 35928 - protein, 39 aa, Homo sapiens
RYQHCKHQVCLETCLCLSFLSSVSTGYVSHCQIPDHKSP

SEQ ID NO: 35929 - protein, 25 aa, Homo sapiens
MTGTASRLAGSSALGFCAPWASSSS

SEQ ID NO: 35930 - protein, 54 aa, Homo sapiens
MFFTLSVILVALSRELSFSGRMEFRRWWNLTQFKVPSGPRPLSMGLISILAVAL

SEQ ID NO: 35931 - protein, 21 aa, Homo sapiens
IKLRNIYTGFMAGILPMFMVE

SEQ ID NO: 35932 - protein, 16 aa, Homo sapiens
ITCIIAGINFKLLFLF

SEQ ID NO: 35933 - protein, 44 aa, Homo sapiens
LKTYRGRRTGIILFVSCFETSICKVSVESQILAPGTFYIHKYKN

SEQ ID NO: 35934 - protein, 40 aa, Homo sapiens
MDITAKVTVVMEDMTTLVTTTTMDMVIIAVSTILFILTAI

SEQ ID NO: 35935 - protein, 47 aa, Homo sapiens
LCQLLLFWKMWTSTKWFHWKQIVVLTMHPFPQALNSQQVPTRMMMSS

SEQ ID NO: 35936 - protein, 39 aa, Homo sapiens
LILVAFFLLFSVVCGFRCRANLRLVRVHVSGNRPCSWLS

SEQ ID NO: 35937 - protein, 29 aa, Homo sapiens
RNLYATISSLSFLLALEALVENGHQTKSR

SEQ ID NO: 35938 - protein, 22 aa, Homo sapiens
LGERYLSFSLSLSLRVVCWFSA

SEQ ID NO: 35939 - protein, 11 aa, Homo sapiens
LLIVWAMIISG

SEQ ID NO: 35940 - protein, 45 aa, Homo sapiens
MLGLSIILNLLFLRENTRFCWNCTLKNGPPWPVPMLLSCAPDCGL

SEQ ID NO: 35941 - protein, 28 aa, Homo sapiens
MRLYNAQASPRDGTSSNYQLIMSQADNR

SEQ ID NO: 35942 - protein, 12 aa, Homo sapiens
RNLHLFWLLQMW

SEQ ID NO: 35943 - protein, 21 aa, Homo sapiens
VAGPASWKLFLMQVVLLPYAF

SEQ ID NO: 35944 - protein, 17 aa, Homo sapiens
ILILVLFSFPSRTRETS

SEQ ID NO: 35945 - protein, 20 aa, Homo sapiens
RLWLLLRSAMAFLWQPLRRP

SEQ ID NO: 35946 - protein, 11 aa, Homo sapiens
LPWRLGFLSWF

SEQ ID NO: 35947 - protein, 67 aa, Homo sapiens
RTTLSMSWQIWGTKSHVIPVTPHVLLMATFNTIPMWCIIQKENSWHVTISTTCTLSLSLMSLKSRSW

SEQ ID NO: 35948 - protein, 12 aa, Homo sapiens
LIYSSMILVLPW

SEQ ID NO: 35949 - protein, 8 aa, Homo sapiens
MVVLLFWI

SEQ ID NO: 35950 - protein, 23 aa, Homo sapiens
LWKDLGLLLSQLSMDSASRPFLT

SEQ ID NO: 35951 - protein, 77 aa, Homo sapiens
IGSSRCLFHHQMPWRPWSVPWAWPSAWWASSWAPSSSSWAHMCPVSPGNDPSERNDLWETPCRSSWVCDSPCVLSAL

SEQ ID NO: 35952 - protein, 27 aa, Homo sapiens
MCCVRTTAAATIFTCGVRARTACLSCS

SEQ ID NO: 35953 - protein, 12 aa, Homo sapiens
RIMCVGVSWTLL

SEQ ID NO: 35954 - protein, 23 aa, Homo sapiens
RYCSSFLLIFAGQSMLYLNPTLI

SEQ ID NO: 35955 - protein, 38 aa, Homo sapiens
VFLKVILTLLLISYLHEYFSLFSVSLKIELPTPKYEIG

SEQ ID NO: 35956 - protein, 28 aa, Homo sapiens
MMIKDTFILTLKPILLFSALNQGRSLWV

SEQ ID NO: 35957 - protein, 8 aa, Homo sapiens
LKLILFLL

SEQ ID NO: 35958 - protein, 14 aa, Homo sapiens
IWKRGVSFSVLCSL

SEQ ID NO: 35959 - protein, 35 aa, Homo sapiens
IEMRRIHLGLAFALGWCWKLLVVARSLLHCKGVRI

SEQ ID NO: 35960 - protein, 14 aa, Homo sapiens
VIPWMVTILLNAAP

SEQ ID NO: 35961 - protein, 28 aa, Homo sapiens
VHLTTAFWLTLLDLTHTECSLSVRDKVS

SEQ ID NO: 35962 - protein, 20 aa, Homo sapiens
VSTMIIFLSWLVNKQYLLSN

SEQ ID NO: 35963 - protein, 27 aa, Homo sapiens
MRGLRSMPSILSNLISLDTNMALSALR

SEQ ID NO: 35964 - protein, 11 aa, Homo sapiens
ILTWAALVMIR

SEQ ID NO: 35965 - protein, 22 aa, Homo sapiens
MLIRASLGSGLLTCHQRSSTGF

SEQ ID NO: 35966 - protein, 46 aa, Homo sapiens
KPSLTAPALSLPSLLPARASCSQVGRWWQLQRPQCQRFRTRLQPCS

SEQ ID NO: 35967 - protein, 31 aa, Homo sapiens
IMELGVEVMEVLMTMVAIIITAMGMMALMTE

SEQ ID NO: 35968 - protein, 47 aa, Homo sapiens
LSFLWTKMSFLRVIFKFKRCSCRCCSIFAVTLRAWRDSSQEVSCSLC

SEQ ID NO: 35969 - protein, 63 aa, Homo sapiens
LSFLFRCLVFLLSFNNVPDPVLGACSFTCPFHLFSGSSCVEHSCLQQVVFITLSFHYKLLLQL

SEQ ID NO: 35970 - protein, 20 aa, Homo sapiens
MDNKYLWNYIMELLLCHLVG

SEQ ID NO: 35971 - protein, 33 aa, Homo sapiens
LKVTKMLHGPWFVTIVFLMASRWNRETWSPWPV

SEQ ID NO: 35972 - protein, 37 aa, Homo sapiens
LQSKGSGLMILKGFLLMVAFVLSSKILFSVVCKQVFF

SEQ ID NO: 35973 - protein, 29 aa, Homo sapiens
LGTHVTLLVMAWQSLICKSFFWIVPNDSL

SEQ ID NO: 35974 - protein, 21 aa, Homo sapiens
ISPRKWFLSSPVWSLLTTLFS

SEQ ID NO: 35975 - protein, 31 aa, Homo sapiens
MATSTFQFQCLVFMAIMTIPQGQMHFVPWTF

SEQ ID NO: 35976 - protein, 31 aa, Homo sapiens
VLAAVFQLSLGTAAVGRFQCIASPGCSSSWI

SEQ ID NO: 35977 - protein, 10 aa, Homo sapiens
MFLILVLISF

SEQ ID NO: 35978 - protein, 21 aa, Homo sapiens
MTMDHSKNLPLPGLLVLALWQ

SEQ ID NO: 35979 - protein, 25 aa, Homo sapiens
LTQDCALTLLLQLPLPGLLVLALWQ

SEQ ID NO: 35980 - protein, 31 aa, Homo sapiens
MTACKRWAMSVTVGCSGITSCLHLPSIPVSW

SEQ ID NO: 35981 - protein, 39 aa, Homo sapiens
VTQSPFKSSITTSLLAWMPLLLIDSTSCERNIRRSSTAE

SEQ ID NO: 35982 - protein, 30 aa, Homo sapiens
ILRLIGMSIHAELAIGEVDPCMGKSSIPTV

SEQ ID NO: 35983 - protein, 25 aa, Homo sapiens
IRVSTPLLSFLATLLQSSTNYPCPG

SEQ ID NO: 35984 - protein, 14 aa, Homo sapiens
KNMLQETLWFPLFL

SEQ ID NO: 35985 - protein, 40 aa, Homo sapiens
RAFSVLVCRGYKTISRIAYICIYFLFHTSAHVVFSQNPFL

SEQ ID NO: 35986 - protein, 31 aa, Homo sapiens
IMYMNFSTPLMPASAILISISTLISLGVTWT

SEQ ID NO: 35987 - protein, 55 aa, Homo sapiens
IHQKYASPRCLVVLVLGTWTVRIPREAAVWMPHLDPVTRLLIASLGLSMCFGSMY

SEQ ID NO: 35988 - protein, 28 aa, Homo sapiens
IPAVVASLSAVTQGFWSLWMIFTFLAVD

SEQ ID NO: 35989 - protein, 16 aa, Homo sapiens
KGGLATKACLLAAAIC

SEQ ID NO: 35990 - protein, 22 aa, Homo sapiens
RKSPILCALVLVPLWTKRCCPL

SEQ ID NO: 35991 - protein, 16 aa, Homo sapiens
LNMVLLLLSLILKRTW

SEQ ID NO: 35992 - protein, 15 aa, Homo sapiens
LNMVLLLLSLILKRT

SEQ ID NO: 35993 - protein, 33 aa, Homo sapiens
MIGLVSKTNAIISLKKKEIGIQVNTTVPLNMPT

SEQ ID NO: 35994 - protein, 20 aa, Homo sapiens
TLLGGVFSPALAGFMISLRL

SEQ ID NO: 35995 - protein, 15 aa, Homo sapiens
KFFMSLLISCHFHIM

SEQ ID NO: 35996 - protein, 30 aa, Homo sapiens
MVVSREVGTIVVRIVCITGVLHLPLGITFC

SEQ ID NO: 35997 - protein, 143 aa, Homo sapiens
LTAWRTCFSSCCQMTDVWSWQHLSPFTPGPEPGQPTMGMLCFCSPSFTMPVSSPPRWGLGGMDRQRMSSTQGLQDLPVAHSARLSTTTPAKEDSIWQSFFQVPSYTCASAFLSWMMVFSLFLSLLSLTALVFHVAHPLSSVNL

SEQ ID NO: 35998 - protein, 17 aa, Homo sapiens
MLGTYPVYILPRHPAWK

SEQ ID NO: 35999 - protein, 10 aa, Homo sapiens
IVKTSIFIWL

SEQ ID NO: 36000 - protein, 49 aa, Homo sapiens
MQNHTNLKILVMEMLTVFITWMSMDTKYMIKWAFMVQYLISWPTNWAEL

SEQ ID NO: 36001 - protein, 33 aa, Homo sapiens
MTTLRRSVSWGLAMAVWCSRSPTSLLAWSWPES

SEQ ID NO: 36002 - protein, 16 aa, Homo sapiens
IGLLVWTYYMDQSLSL

SEQ ID NO: 36003 - protein, 21 aa, Homo sapiens
LCLKFSIFVGCFLYMQKVISP

SEQ ID NO: 36004 - protein, 15 aa, Homo sapiens
MIWSILITCCCVLWT

SEQ ID NO: 36005 - protein, 35 aa, Homo sapiens
IFSGRVPGSSSSFLLFLLLLHLRLLGDHCPLSAAE

SEQ ID NO: 36006 - protein, 13 aa, Homo sapiens
IVVVVLLLLWLQF

SEQ ID NO: 36007 - protein, 13 aa, Homo sapiens
LPSWVWFLWCFCK

SEQ ID NO: 36008 - protein, 14 aa, Homo sapiens
MTFFGCLWLCRAVW

SEQ ID NO: 36009 - protein, 41 aa, Homo sapiens
IQLSNFLFLVWLLWCAKLRTLLFCHTATPYRCGRCEICHQL

SEQ ID NO: 36010 - protein, 12 aa, Homo sapiens
RHMHILLLQLHL

SEQ ID NO: 36011 - protein, 73 aa, Homo sapiens
MEPKTKMTERTLAKIFQLHCLTLFYFSDTSPTLIEPVACNLVSQLCLFFLMYLFQTFLPLSTCIIRLEMGMRV

SEQ ID NO: 36012 - protein, 23 aa, Homo sapiens
IVIFPILVLGASKLSSLLDNQPE

SEQ ID NO: 36013 - protein, 15 aa, Homo sapiens
MTMRQIVSFFFFSFY

SEQ ID NO: 36014 - protein, 34 aa, Homo sapiens
LRTRGQCGWLALPLAGAFPEDGVRSVGYSWMEHL

SEQ ID NO: 36015 - protein, 12 aa, Homo sapiens
MPYPVPKKTLGP

SEQ ID NO: 36016 - protein, 32 aa, Homo sapiens
MGCDTLLFFFFLFFQSFLLAQLQCVPEWGRGG

SEQ ID NO: 36017 - protein, 92 aa, Homo sapiens
IKNRGGCLLLLVLHPSRHSAVSCLGVAAAMARKALPPTHLGQSWFCSCCRDTELAISALRARTATGSPGSCRCTAGPLPCASALESCCCRVT

SEQ ID NO: 36018 - protein, 31 aa, Homo sapiens
LLLARLYFTWDMLLCWDSCMSTGLSSTCSRP

SEQ ID NO: 36019 - protein, 32 aa, Homo sapiens
MAVILRTQTYGSLWSTVGLVLYLISFDYEIKR

SEQ ID NO: 36020 - protein, 16 aa, Homo sapiens
RERHNWLQPFSCLFLL

SEQ ID NO: 36021 - protein, 25 aa, Homo sapiens
MAQSRLTATSVSQAQAILLPQTPRF

SEQ ID NO: 36022 - protein, 16 aa, Homo sapiens
MQHTLWIACGTVLLSC

SEQ ID NO: 36023 - protein, 12 aa, Homo sapiens
VILNVFILTFLT

SEQ ID NO: 36024 - protein, 23 aa, Homo sapiens
MLSILICQVILKNMCIVLAVQDV

SEQ ID NO: 36025 - protein, 16 aa, Homo sapiens
LKTLFLKWFVLMLLSN

SEQ ID NO: 36026 - protein, 39 aa, Homo sapiens
LRRSRMRPAAVAPASAGAAAAEAAAEAAATAAPPPADLD

SEQ ID NO: 36027 - protein, 26 aa, Homo sapiens
RFGLVVPLRAAAAISVVGPAWWPKTG

SEQ ID NO: 36028 - protein, 22 aa, Homo sapiens
RTEFIVWHLYLMPALFNTSPLR

SEQ ID NO: 36029 - protein, 14 aa, Homo sapiens
IHSIVCVVLVLCPN

SEQ ID NO: 36030 - protein, 31 aa, Homo sapiens
IKLEIVCRLISLLTCSSVSAMFEIFVLDGES

SEQ ID NO: 36031 - protein, 15 aa, Homo sapiens
LILLSHPFFSLLLFA

SEQ ID NO: 36032 - protein, 9 aa, Homo sapiens
IWMASVAFM

SEQ ID NO: 36033 - protein, 46 aa, Homo sapiens
MMAPASKTLTGASHLWGAALWSLQAPGRWGSQPSCTRSGCRGARSC

SEQ ID NO: 36034 - protein, 18 aa, Homo sapiens
MFAAMGSWRYILSHLWLM

SEQ ID NO: 36035 - protein, 50 aa, Homo sapiens
LLLPGLFYYGRRCGVLLQSFHVIVSWLVHFIKWLHPNICIWSRLQKRTED

SEQ ID NO: 36036 - protein, 15 aa, Homo sapiens
MESFGQYWGVRNSSV

SEQ ID NO: 36037 - protein, 54 aa, Homo sapiens
RIATVSIAAAVAPLTLFLYRGDGGLSSRRRADAAAGAFQLMWRSRCEATYKSIY

SEQ ID NO: 36038 - protein, 46 aa, Homo sapiens
RIATVSIAAAVAPLTLFLYRGDGGLSSRRRADAAAGAQETIYPACC

SEQ ID NO: 36039 - protein, 42 aa, Homo sapiens
LAAAALAAVGGRAGGEGGGGEKRRWRRLGLAPLKSAYPLAAS

SEQ ID NO: 36040 - protein, 19 aa, Homo sapiens
IAYLYWVSLMPAWTILEAV

SEQ ID NO: 36041 - protein, 29 aa, Homo sapiens
LGPVAHVAGDVKGFFVVLFFFFFFFSGGV

SEQ ID NO: 36042 - protein, 39 aa, Homo sapiens
MEWRHMSSTSLVPGASPSVPKASCTAASSALATVWPTRQ

SEQ ID NO: 36043 - protein, 12 aa, Homo sapiens
LLSLYLFLLTLL

SEQ ID NO: 36044 - protein, 25 aa, Homo sapiens
RGVTSLLLSLSSSSAPRFRGCPSAL

SEQ ID NO: 36045 - protein, 12 aa, Homo sapiens
IMKKKMLLYWIL

SEQ ID NO: 36046 - protein, 23 aa, Homo sapiens
LGRGELLEKMVKLVLLVLWARRV

SEQ ID NO: 36047 - protein, 42 aa, Homo sapiens
IIWGDFIFRSLYKGFLMSITCWMRLCSSPPLSEWSVSINWTP

SEQ ID NO: 36048 - protein, 16 aa, Homo sapiens
KVFMGLFLALIQVCMK

SEQ ID NO: 36049 - protein, 15 aa, Homo sapiens
MMKIGLPLSLILIPW

SEQ ID NO: 36050 - protein, 38 aa, Homo sapiens
VVAVLWVWPFATVLAVASLWLSLRRSKPVHGTRSSASA

SEQ ID NO: 36051 - protein, 20 aa, Homo sapiens
IVLLLLFTLLLGFYEGFVKS

SEQ ID NO: 36052 - protein, 17 aa, Homo sapiens
LKEKEALWLYILWAWVS

SEQ ID NO: 36053 - protein, 17 aa, Homo sapiens
LGTKLLISFATLCIPSL

SEQ ID NO: 36054 - protein, 51 aa, Homo sapiens
VRDWVWPAALVSAVSCALHAGSALQGLLSAQRTPAARGRRGPELPPAVFTH

SEQ ID NO: 36055 - protein, 29 aa, Homo sapiens
MENMLRSCLMTFLKIILMLFVQWKIQIKS

SEQ ID NO: 36056 - protein, 12 aa, Homo sapiens
MSIVVMIFLSTL

SEQ ID NO: 36057 - protein, 11 aa, Homo sapiens
MLVLGIMISTT

SEQ ID NO: 36058 - protein, 9 aa, Homo sapiens
LAVLWGFWS

SEQ ID NO: 36059 - protein, 63 aa, Homo sapiens
MVVGVQLPGTILGSGITALMSQFCCHPALSMASQFPKSAWKMWGAPHRLANGKRMKIGLTSLS

SEQ ID NO: 36060 - protein, 11 aa, Homo sapiens
RHRFLLNLLLL

SEQ ID NO: 36061 - protein, 14 aa, Homo sapiens
IGAFSCSLLLEFFS

SEQ ID NO: 36062 - protein, 26 aa, Homo sapiens
LLLALGVLLLVPVPWMKASLRASWEE

SEQ ID NO: 36063 - protein, 58 aa, Homo sapiens
RSVTAGAFWNAAILLPSSRGATSRVSQTAWSGFFALVLPRSLYSGRAVHGSVELSSLR

SEQ ID NO: 36064 - protein, 54 aa, Homo sapiens
LLRHQAEGYRQGSCDLNPLLPQYRILSLTLPFVFPPMFKMFGWFVVLPGDKVLT

SEQ ID NO: 36065 - protein, 14 aa, Homo sapiens
LFLVLIYFCLPFPT

SEQ ID NO: 36066 - protein, 52 aa, Homo sapiens
LEAQVVLLLLSHGARCFLITWLPPRPLCSCLLFGCRRCCLWPPAFCCYPESC

SEQ ID NO: 36067 - protein, 34 aa, Homo sapiens
MKEHLPCLKLLETRGPTTPVAFVGAVVAAAPASL

SEQ ID NO: 36068 - protein, 11 aa, Homo sapiens
TIVMLSMLSSL

SEQ ID NO: 36069 - protein, 61 aa, Homo sapiens
MQQKPHRLERNKSSFLCPGAGCGALAEPSLQSPPGPLAVEGGASRGDRGTRRAEPGGPQGP

SEQ ID NO: 36070 - protein, 10 aa, Homo sapiens
MLRFLTVCFA

SEQ ID NO: 36071 - protein, 32 aa, Homo sapiens
KEPGTLDTEVTCAFGTSLWKTQTLHDTQTRSR

SEQ ID NO: 36072 - protein, 125 aa, Homo sapiens
ISFLHIQVRWRLLWRLGPRALETSALAPASLLPWPGAAALPRRQHGWPPGRGLGGGGPAARRGRLLLHLQADPGSAAGRPRARDTLFEVRRCPGRRDVRGSVVRALGPASDGRYLGVTVVQDLAA

SEQ ID NO: 36073 - protein, 17 aa, Homo sapiens
KWGMTSWGTLWWASGCG

SEQ ID NO: 36074 - protein, 41 aa, Homo sapiens
VVVKMVTLMMMVMMMMMTEVVMAYPFISVCHAHPIENHRKR

SEQ ID NO: 36075 - protein, 12 aa, Homo sapiens
RPVIVAMSLVLV

SEQ ID NO: 36076 - protein, 15 aa, Homo sapiens
VCLFARLVIYLLCLN

SEQ ID NO: 36077 - protein, 33 aa, Homo sapiens
IWQTVKRVRLHCTRLPASGTGLCASFWWMQEHL

SEQ ID NO: 36078 - protein, 37 aa, Homo sapiens
LEGIMILDKTKAPNLTMFCLLSLAACKQLFAKNPGHC

SEQ ID NO: 36079 - protein, 15 aa, Homo sapiens
MQKPRVVFLLMMQIL

SEQ ID NO: 36080 - protein, 40 aa, Homo sapiens
MRISQLWLSACMHESSSFLLNSLALWTLLPRRAKTPELEA

SEQ ID NO: 36081 - protein, 11 aa, Homo sapiens
LWITSCWLIAL

SEQ ID NO: 36082 - protein, 20 aa, Homo sapiens
LGLNRVTWILSFLPSHMLTF

SEQ ID NO: 36083 - protein, 31 aa, Homo sapiens
MKATGAAPGTAFASTQNQCSGSEILDRKSIL

SEQ ID NO: 36084 - protein, 9 aa, Homo sapiens
ISRTLVFLL

SEQ ID NO: 36085 - protein, 28 aa, Homo sapiens
KSFLIFLIHHLMFLRDYRCLMIPVTREE

SEQ ID NO: 36086 - protein, 10 aa, Homo sapiens
IFLMTLTCVG

SEQ ID NO: 36087 - protein, 38 aa, Homo sapiens [sequence omitted]

SEQ ID NO: 36088 - protein, 51 aa, Homo sapiens
IVYVWVSLSPPLVLILTCRNTQQTHVCEGPEKPDPVRKNSLFTLNKPNIPF

SEQ ID NO: 36089 - protein, 14 aa, Homo sapiens
VQVWALTWLWMQSF

SEQ ID NO: 36090 - protein, 32 aa, Homo sapiens
MVVLMFLSAGPIVPLLRNVSPVQGQRLKRLLY

SEQ ID NO: 36091 - protein, 17 aa, Homo sapiens
RREMDMAHCSTILLLFL

SEQ ID NO: 36092 - protein, 50 aa, Homo sapiens
IIPQRAAAAALGMLSLRAPLGRREASSGSGLRSVGASARLSPALAGLSGP

SEQ ID NO: 36093 - protein, 25 aa, Homo sapiens
ILLRTLLVVVLIDFLLSIYLKDGTD

SEQ ID NO: 36094 - protein, 37 aa, Homo sapiens
MLLNQTLSRLLCAASGASTWWAVHSPALLSLRGLVYP

SEQ ID NO: 36095 - protein, 20 aa, Homo sapiens
ILQSLLILFLGVTIFEAKLT

SEQ ID NO: 36096 - protein, 17 aa, Homo sapiens
LAPQVWDFWVFSWLASC

SEQ ID NO: 36097 - protein, 13 aa, Homo sapiens
LLWLSLICLLGLL

SEQ ID NO: 36098 - protein, 9 aa, Homo sapiens
LPFFFLFSL

SEQ ID NO: 36099 - protein, 23 aa, Homo sapiens
IRTGTLALSLVSGAATCPVFPVS

SEQ ID NO: 36100 - protein, 61 aa, Homo sapiens
LFLATSCEKTNIWVTLVSTLVLLLVIVASAAIDHTRVVIQKLVSLFICLVNFIIWFLSITN

SEQ ID NO: 36101 - protein, 15 aa, Homo sapiens
MALAVGAGALLRPLR

SEQ ID NO: 36102 - protein, 66 aa, Homo sapiens
ILLFLDFFLIKRLLQCLSCDSGMDICPRLSCWGPSMSLQVPSWSPSPALEAWLRASWRRSFGSMLS

SEQ ID NO: 36103 - protein, 15 aa, Homo sapiens
LALDPTTRKNPKPNV

SEQ ID NO: 36104 - protein, 22 aa, Homo sapiens
TPFLITSSWCSRLAALTFLLAG

SEQ ID NO: 36105 - protein, 7 aa, Homo sapiens
LFLVFII

SEQ ID NO: 36106 - protein, 37 aa, Homo sapiens
KQQQFFFFLPLFLILDREVFLAFLPFFFFLQTKQKTA

SEQ ID NO: 36107 - protein, 30 aa, Homo sapiens
LYSQLFSFCKFFFFAVIPTLVTRSFSANCS

SEQ ID NO: 36108 - protein, 21 aa, Homo sapiens
VRSPLPPVVSSLAFWLCHALL

SEQ ID NO: 36109 - protein, 13 aa, Homo sapiens
IFLLLVVFLPFPC

SEQ ID NO: 36110 - protein, 34 aa, Homo sapiens
VRFLFGFLPASGATRVARQQPLGDLVLGSCPAWG

SEQ ID NO: 36111 - protein, 61 aa, Homo sapiens
MSLWSCLLFLCTPSPTTTSPSPDPSQPLRRQMSLWTPTSLNLIPTMPQMMTLCLRTLPGFG

SEQ ID NO: 36112 - protein, 37 aa, Homo sapiens
LCVLQIVTLMVAPMAWLEDKQIEDIGNGVIKMIDHEA

SEQ ID NO: 36113 - protein, 13 aa, Homo sapiens
VWVLLSVVWLWDP

SEQ ID NO: 36114 - protein, 27 aa, Homo sapiens
IDLENKVSTRCFVVSVFLLFTLPESVL

SEQ ID NO: 36115 - protein, 44 aa, Homo sapiens
ICHLHSGISSQSPVSRLSPRRSLLPVLPPLCSVLVSAFIPEWIW

SEQ ID NO: 36116 - protein, 28 aa, Homo sapiens
LIWLLGCYLEIQALKMPASLDLEDDLDK

SEQ ID NO: 36117 - protein, 26 aa, Homo sapiens
LSKVATLTVFSCCLCHLLCQKIPFQL

SEQ ID NO: 36118 - protein, 29 aa, Homo sapiens
LPPHSLSPLVLLTPGVSLSAFPNPPIPPV

SEQ ID NO: 36119 - protein, 59 aa, Homo sapiens
ILVFLLLFSSFVFFFSLETGSSYVGQAGLESPGSSDPPASASGKVGLQARIAAPGQSLF

SEQ ID NO: 36120 - protein, 63 aa, Homo sapiens
MLGAPAFLAAIQHSVHAPRGQRLLPPGAIAASAVSTAQPLSLCLRQPCRAAHPEARARMGSLR

SEQ ID NO: 36121 - protein, 45 aa, Homo sapiens
MGAFLLATSLKWNLLVALLPLQLWCYTEKLEVSKQTREKEKHQKV

SEQ ID NO: 36122 - protein, 82 aa, Homo sapiens
MWPLQHISVASVSVVSFLCLAPHGFKSTRAGVETAHLALILSDWWFWPVSRTTPGQFRGSFKGTRKGPGALFAQLCWGAALL

SEQ ID NO: 36123 - protein, 25 aa, Homo sapiens
MFPGIMLRTAFRVAALFSSLHLGNT

SEQ ID NO: 36124 - protein, 48 aa, Homo sapiens
MTSLSIPSQNCSKRLLSSSLCSSCACSKALWKAEPTQFKGPDSGDLVS

SEQ ID NO: 36125 - protein, 73 aa, Homo sapiens
MVSPVYRNSSADGNFPPSCIKPESSHLAEIFLSRCCKASTDHLLCDPSWMGRIKEEGLKRMLLDIIYMTYFQK

SEQ ID NO: 36126 - protein, 19 aa, Homo sapiens
MVVAALFTTSKIRKQPKCP

SEQ ID NO: 36127 - protein, 62 aa, Homo sapiens
MSEVVCVGHGVGGKFMKGNLLPKFKGLKGCFKWDRKTLRKVHSRSSVVECCGKSGTLNEGTG

SEQ ID NO: 36128 - protein, 55 aa, Homo sapiens
METNVSLTRLYFVPGTGFGITPFKPHYHPSCYYSTLPLRRNKIFLLNSSNLRSHI

SEQ ID NO: 36129 - protein, 58 aa, Homo sapiens
MKKNKLRTTLYVHLQMPQLMLVGCLSAFCDNEHMDFCLLNSVDPFSQLPGAWIFTSNC

SEQ ID NO: 36130 - protein, 34 aa, Homo sapiens
MGSSGHQPRPPTSGARAPDPDLDPSLHPHPDSSS

SEQ ID NO: 36131 - protein, 71 aa, Homo sapiens
MSSRELPWPRSESSWDATGSESAPQVSPPAPPNLSIPTRITPSAAGRGARGMARRVGTWGTGGKGKPPSFS

SEQ ID NO: 36132 - protein, 42 aa, Homo sapiens
MAATSQLAMNMLLTVTHTHSSLFRPSWAVPSSIGCLMTAGKR

SEQ ID NO: 36133 - protein, 28 aa, Homo sapiens
MSGKMLYSVKNAYMILILWHFKLSTPRF

SEQ ID NO: 36134 - protein, 37 aa, Homo sapiens
MSRVELAESRALLHPTGLCVLGLARGEPRWQSSRTRP

SEQ ID NO: 36135 - protein, 7 aa, Homo sapiens
MPIRQPA

SEQ ID NO: 36136 - protein, 37 aa, Homo sapiens
RRILFLFLFLFWPTAAAMALSSSAGVHPASWVPELPV

SEQ ID NO: 36137 - protein, 38 aa, Homo sapiens
LRVLLCLISLLLLCYMCVCHFQFFVKDTKNLGLHNTSR

SEQ ID NO: 36138 - protein, 37 aa, Homo sapiens
IYCSGCFLIPVLLGPGSFAPCPAPRRGGWCGNGWARW

SEQ ID NO: 36139 - protein, 19 aa, Homo sapiens
TAMKLVFLGGDFSIVLSMC

SEQ ID NO: 36140 - protein, 19 aa, Homo sapiens
ITIMAVFLCLKTVKQERII

SEQ ID NO: 36141 - protein, 63 aa, Homo sapiens
LIKEHTKIGGMKHLQNCPNGPSGDPGNKCLSSHDQSFYFFLILCIWLVYMSQNQVLKQEVIQK

SEQ ID NO: 36142 - protein, 37 aa, Homo sapiens
MVHLGILGTSVFQATTSLSTSSSYFVSGLCTCHRIRY

SEQ ID NO: 36143 - protein, 69 aa, Homo sapiens
VKQTHRILVIISGSLHFICLMEILSDIQQPCKWSGLCQTATNSCRTISEAAYPRSLMWKDMAVTAWGSK

SEQ ID NO: 36144 - protein, 26 aa, Homo sapiens
LLLTLSLFKLSLQLDARITFGAESPG

SEQ ID NO: 36145 - protein, 70 aa, Homo sapiens
KPGIGELLRQTSPLSSRYPRSPMQETSLALRTSDQLREHSGLCLWIWCSIIGKRLPGDSAFQNYRCLPPP

SEQ ID NO: 36146 - protein, 52 aa, Homo sapiens
RAFTKMAKAFRRRCFKMGSLDPVLKLSCSKAALCAIRINEGEGFCVEKRLGV

SEQ ID NO: 36147 - protein, 12 aa, Homo sapiens
LASFLTYVAVAF

SEQ ID NO: 36148 - protein, 13 aa, Homo sapiens
VIWCTLIPVTFGL

SEQ ID NO: 36149 - protein, 16 aa, Homo sapiens
LICISKPPIFLCLMLI

SEQ ID NO: 36150 - protein, 17 aa, Homo sapiens
KWTLTHLMLMFMAQTGT

SEQ ID NO: 36151 - protein, 76 aa, Homo sapiens
LVILHLFSQLPAAWVLGPPCCSPPSCCFSPATAPCAATHLPTAPILTCWAPGSSRWAPAVPSAMSTARLWDHKKKK

SEQ ID NO: 36152 - protein, 33 aa, Homo sapiens
LTSTAGLTFRLIFLVAPPLHSRPKSPRTFSSSC

SEQ ID NO: 36153 - protein, 25 aa, Homo sapiens
IILNSSLVLLVSWLLSMQILQVWNA

SEQ ID NO: 36154 - protein, 17 aa, Homo sapiens
TKVSALMCFLPLMHWVS

SEQ ID NO: 36155 - protein, 12 aa, Homo sapiens
LYWGYLGLCSLL

SEQ ID NO: 36156 - protein, 25 aa, Homo sapiens
RGFCFCFFLSFSCCRRVRRTFCLPP

SEQ ID NO: 36157 - protein, 103 aa, Homo sapiens
LAGSGPVKQPGSWLCAAWGAVLAWGAVLACAGASAPPGSCIPVSRAAALRAWKTGTGHSLPRRHPGSPRFTPKRETKGFLVPSQEKGDPKMTKCLKPWELQMN

SEQ ID NO: 36158 - protein, 33 aa, Homo sapiens
LGAPWFRRQPPASSSFCCCSWGLCLLPTPALCP

SEQ ID NO: 36159 - protein, 21 aa, Homo sapiens
VRTPATWYSSSWMLIIACLPP

SEQ ID NO: 36160 - protein, 14 aa, Homo sapiens
TWAAPGAALVLVSF

SEQ ID NO: 36161 - protein, 21 aa, Homo sapiens
LVTFLYMVRFYILIRPTPWDI

SEQ ID NO: 36162 - protein, 30 aa, Homo sapiens
REARCWWIHALRVLWCPVGGSDLLLCLRGL

SEQ ID NO: 36163 - protein, 97 aa, Homo sapiens
ITLFVASASVSGWALTSHLRRGSEPGPDPGDCRPLLSSLTRGFPPRTPTSGLAFPSLLRVWREPALRPERAWGPPAVKTSRGPIHHGGRRRRERQEK

SEQ ID NO: 36164 - protein, 100 aa, Homo sapiens
ITLFVASASVSGWALTSHLRRGSEPGPDPGDCRPLLSSLTRGFPPRTPTSGLAFPSLLRVWREPALRPERAWGPPAVKTSRGPIHHGGRRRRERQEKDKF

SEQ ID NO: 36165 - protein, 34 aa, Homo sapiens
LEEPAGLNQGDAEDDDLLPRPLEPSACARHPRLA

SEQ ID NO: 36166 - protein, 73 aa, Homo sapiens
VHLLLLSACLLPHRRVSGHPSFSAWGPHHHPQHCRCLFFTVSFSTHPLLSSLLPAPLNLPGPASPVMLGWSKH

SEQ ID NO: 36167 - protein, 120 aa, Homo sapiens
RMSNKGKKLKRIILAIPPAAPATVAMRPVEAAPSGRQAIVVEIGIGIDGEIVGAEVQVGSVVTVAVAGIVDMVVSREVGTIVVRIVCITGVLHLPLVIGMDTVRVLISERRAQSGSQLII

SEQ ID NO: 36168 - protein, 11 aa, Homo sapiens
MRFGLILRAVV

SEQ ID NO: 36169 - protein, 37 aa, Homo sapiens
KNCAMKNGKLLRSCSSVRRAADKLDWGRFFLQDLQSV

SEQ ID NO: 36170 - protein, 69 aa, Homo sapiens
ITSTQEMSTEELMNEPSCDHLARQPKNKAVTMETKKRQKDTGSSLSRPAVHEALSEAHVTSGLLTYMRE

SEQ ID NO: 36171 - protein, 51 aa, Homo sapiens
LSVCGIRRSGALFFLVCVCVRARVCVCWVCVFWGFAGARRGEPGRGEGRKP

SEQ ID NO: 36172 - protein, 76 aa, Homo sapiens
IAALSVSAAPLSGPGLRGPPAPWASAASPPPRPCWSFSTSSSGGQLAFYAMWEPMSSSLMMTMTTSLKMCTRSSLL

SEQ ID NO: 36173 - protein, 26 aa, Homo sapiens
ICSGILVEILLVLPGCSFCSSLVFFL

SEQ ID NO: 36174 - protein, 32 aa, Homo sapiens
IHHFYLLCGVLSICLPHSASAGVPAGLVLPLC

SEQ ID NO: 36175 - protein, 21 aa, Homo sapiens
TDPHSSQGPQTSVSLGSSLMT

SEQ ID NO: 36176 - protein, 57 aa, Homo sapiens
IFSGRVPGSSSSFLLFLLLLHLRLLGDHCPLSAADTGCSSRLGLFTYAPHRSLGRPT

SEQ ID NO: 36177 - protein, 31 aa, Homo sapiens
MNETISVISQRVFLSFQGCVTGMVVGGFDSG

SEQ ID NO: 36178 - protein, 54 aa, Homo sapiens
LERSRERAQAAVLIPFWPAVFRSVSTALQEWQILGSLLASLWQWSGISHPQWRL

SEQ ID NO: 36179 - protein, 13 aa, Homo sapiens
LFLSFFLSFFFLF

SEQ ID NO: 36180 - protein, 46 aa, Homo sapiens
KCLSLWSLLSPAACRLSLCMTGMDSEFCSTSPRREPLGTQRYRCCS

SEQ ID NO: 36181 - protein, 26 aa, Homo sapiens
MTFFGCLWLCRAVWTKERSSLGLAVL

SEQ ID NO: 36182 - protein, 15 aa, Homo sapiens
IQLRILLSRSLFYLL

SEQ ID NO: 36183 - protein, 33 aa, Homo sapiens
TEVSFFFVLFPGCCLLSWSAPEPSAPRRHASEN

SEQ ID NO: 36184 - protein, 33 aa, Homo sapiens
IFHLTPSAKPPGPLVHPWWPLCLLCSVLPMAQT

SEQ ID NO: 36185 - protein, 18 aa, Homo sapiens
MTTSVLSLNGTFLLFPWC

SEQ ID NO: 36186 - protein, 74 aa, Homo sapiens
TAAVPAAATVVAVPAAAAAATGAAAPAAAAAPAADTAAAAPAEATSPPLPGPWASLHLRDQGQQKLAGILTKPE

SEQ ID NO: 36187 - protein, 38 aa, Homo sapiens
TLGVFLRPKPWLCHFLLAGLHYCVFVRPGVCPGHNQSS

SEQ ID NO: 36188 - protein, 18 aa, Homo sapiens
MLYLKNTSKFSAQEIGLM

SEQ ID NO: 36189 - protein, 38 aa, Homo sapiens
VAAAAAAGAAWIGALSCGISSRCSSATRSGGWTCWTDM

SEQ ID NO: 36190 - protein, 19 aa, Homo sapiens
LITLLSFLPVLCWQGRVPK

SEQ ID NO: 36191 - protein, 58 aa, Homo sapiens
ISSLGLDCPYKSAQTTGWRLWLTWYRREQRYWDHMETTYYLLTTKFWKRGVDESDYQK

SEQ ID NO: 36192 - protein, 34 aa, Homo sapiens
MLARMFNNFCLQAIFPPGPPQVLSLQASATTPSL

SEQ ID NO: 36193 - protein, 32 aa, Homo sapiens
RRITLTWSSSIALLSTILWPRPMALHGCTGWG

SEQ ID NO: 36194 - protein, 51 aa, Homo sapiens
MMPIGRKPSGPPWMSATILTLTARTASTTLTTGTAAATPTTRWTGEKVQGQ

SEQ ID NO: 36195 - protein, 34 aa, Homo sapiens
MNLTGLSSALCGHSSATQSPRESPAAPRAPGPSQ

SEQ ID NO: 36196 - protein, 25 aa, Homo sapiens
TQQDRISVDICLEEQFYCDILKKQI

SEQ ID NO: 36197 - protein, 34 aa, Homo sapiens
VSLFLLKPLSLTVPANRSGRPQHTRRTDTGSKLH

SEQ ID NO: 36198 - protein, 54 aa, Homo sapiens
LVSPRYGSSASAVRPLGLLADRCPSRTTHCMQRKTVPNKQSVLFFVPARTETGE

SEQ ID NO: 36199 - protein, 54 aa, Homo sapiens
IFSPRSSPQGCASSSTSRSALSSTTQGRSCSTPSWTPCLCAVLWTSLLALTIPS

SEQ ID NO: 36200 - protein, 89 aa, Homo sapiens
MRLRSRSQGQRRRTGPLQCPVMIQPLQRPPAATPAACAGAAAVAAPGTKSGGARGRPPGRASCSPSPAVKYVPRQVLRRCRAGRSLLTS

SEQ ID NO: 36201 - protein, 44 aa, Homo sapiens
TATPPLPSLRPFFLSLFSFFLPLLAATAQDRRPGDELGAAARVY

SEQ ID NO: 36202 - protein, 21 aa, Homo sapiens
ILNVQRVFLLCFPGWSAMVPS

SEQ ID NO: 36203 - protein, 19 aa, Homo sapiens
LAVLSTWNTLPSLSSPPCH

SEQ ID NO: 36204 - protein, 51 aa, Homo sapiens
MRLQMCLPKSTASRVRRRAGWPRRRRSCVLGARSSTWTPPRVSSISLSTSC

SEQ ID NO: 36205 - protein, 25 aa, Homo sapiens
LLAEAAESVRLQVGSRGRDVSGVGC

SEQ ID NO: 36206 - protein, 18 aa, Homo sapiens
LAWVWEQQLLWLGLPAVW

SEQ ID NO: 36207 - protein, 35 aa, Homo sapiens
LWLTLLMYYLYPSGFTITSATTGLSREPFACSAST

SEQ ID NO: 36208 - protein, 11 aa, Homo sapiens
LVFLFLFFFFF

SEQ ID NO: 36209 - protein, 13 aa, Homo sapiens
MILIHALNIMLAG

SEQ ID NO: 36210 - protein, 46 aa, Homo sapiens
IWQRILHLSLLPVITKWLLLSTTAKPCERLQTAHHFCPVSVNTFCS

SEQ ID NO: 36211 - protein, 17 aa, Homo sapiens
KELGLISAIILLWKLKY

SEQ ID NO: 36212 - protein, 19 aa, Homo sapiens
LACILNLKLIITTLALELL

SEQ ID NO: 36213 - protein, 20 aa, Homo sapiens
ITSPPSRWAMCLSSWALLSW

SEQ ID NO: 36214 - protein, 25 aa, Homo sapiens
RFGLVVPLRAAAAISVVGPEVYADL

SEQ ID NO: 36215 - protein, 9 aa, Homo sapiens
LYWGYFFGF

SEQ ID NO: 36216 - protein, 79 aa, Homo sapiens
LPGPASTLLLFYHAAFLLEPEQLPEKRRTSKAFWNSPRRSGWRVPLKWTGPTISQSWPFTSCPLSSGEPHVWKSCGGCW

SEQ ID NO: 36217 - protein, 13 aa, Homo sapiens
MSWTCSGWLISMF

SEQ ID NO: 36218 - protein, 34 aa, Homo sapiens
IGERSGRGWHLSLLLALVPVAEETPPQLPGVFYE

SEQ ID NO: 36219 - protein, 48 aa, Homo sapiens
MHYGGKNEKEEIKKLNRMMARLILVTLSSVSPTRLTRGMNSPTGSRTL

SEQ ID NO: 36220 - protein, 24 aa, Homo sapiens
MMRAWLTATSASQLQVILLPQPPE

SEQ ID NO: 36221 - protein, 17 aa, Homo sapiens
MLPLTSSLSMKLILLSW

SEQ ID NO: 36222 - protein, 20 aa, Homo sapiens
IFHLTPLLLLGFNYANVGGE

SEQ ID NO: 36223 - protein, 16 aa, Homo sapiens
TALFWVALLFQIPVVT

SEQ ID NO: 36224 - protein, 25 aa, Homo sapiens
KVSGAAQLCLSLYLCEGREWAEQNF

SEQ ID NO: 36225 - protein, 65 aa, Homo sapiens
IGGDSRGSGGDSPASGGGRRHQRQCRDRIRAALRYLSLSLLPPYLARSLARSLRGSLSSSGRRRV

SEQ ID NO: 36226 - protein, 27 aa, Homo sapiens
IGRRDVSSVLCGPAGLLLWVCRLLSLL

SEQ ID NO: 36227 - protein, 34 aa, Homo sapiens
LGQSLVIHLLLVFFQSLLVTGWEALLKIPTKTGS

SEQ ID NO: 36228 - protein, 15 aa, Homo sapiens
ISILSVVWLTLRICP

SEQ ID NO: 36229 - protein, 107 aa, Homo sapiens
MTPLLLTPQSAVPLPSLGRASREPGVAFQLVSRFSPGLGGGSLRGAGRSFACGVNARSTCSFSSRPLRASPVSPRRAAAAAAAAERGGGGGSPRRRQQLQRNGGDRG

SEQ ID NO: 36230 - protein, 72 aa, Homo sapiens
LPSVFPSVLILSPSALLCVPPLPLHFLSSHPQSHPRAVSLSGASPSCSLSPVLPTLTSRRPWPPSQTGSYSC

SEQ ID NO: 36231 - protein, 14 aa, Homo sapiens
IRVLLLIIFAWEVE

SEQ ID NO: 36232 - protein, 49 aa, Homo sapiens
ILSVSAALVTLWRWGASWGCAPWRAGYHVCVEVPRVCYADAVLVETTPL

SEQ ID NO: 36233 - protein, 52 aa, Homo sapiens
VCVWLWVSCAVLLEHRGKAVDAGSQLAETCRPWSLMIVPVPLWRSLTAWRCW

SEQ ID NO: 36234 - protein, 26 aa, Homo sapiens
IKGRTLLAGVCWTLSFHLLTKRIPIP

SEQ ID NO: 36235 - protein, 21 aa, Homo sapiens
LSETCLLLWPLVLSCSPAWCV

SEQ ID NO: 36236 - protein, 43 aa, Homo sapiens
VVFVHLEFLYLFVVGMRDDHIYFSQIHLELTLPGKLQQWERTM

SEQ ID NO: 36237 - protein, 51 aa, Homo sapiens
VALSGSNKSKLWVCECLCVLLFTSHLLKSVYVRGWGVCVKESEEEKEREIN

SEQ ID NO: 36238 - protein, 14 aa, Homo sapiens
KSLLLMIFLDTILI

SEQ ID NO: 36239 - protein, 30 aa, Homo sapiens
VGSSARRQGWRGLCAPTSAAAWLCWPSCPP

SEQ ID NO: 36240 - protein, 55 aa, Homo sapiens
TPTAPLRAGWAAGSRLQRWVDLGSGFQHVAALGLPLLPAGVGQCPEQALFPSPVG

SEQ ID NO: 36241 - protein, 112 aa, Homo sapiens
MLFAAVRTGLSARPRRSLASSLRAPGRPSPGRAEEGADFGFASRSLLCPGASQGRRLEASGRGETYPCVYPPHALPPSFPVLEPWPGKPRQGKRTVAALLERDHLQTPTKVK

SEQ ID NO: 36242 - protein, 29 aa, Homo sapiens
RVSVVLVGLLVLLVLLKDRCSGKLGGLSH

SEQ ID NO: 36243 - protein, 12 aa, Homo sapiens
TEGERDRASNAI

SEQ ID NO: 36244 - protein, 87 aa, Homo sapiens
VEGLDCLSLLTFIFPLCWMPPALKHQTPGSSAFGLLDLPPEWFARGSQAFGYRLRAALSAFLLLRFWDFTGFLAPQLADGLLWDLTL

SEQ ID NO: 36245 - protein, 25 aa, Homo sapiens
MVLLMVWVVMAVVVEAVEVTMGKAA

SEQ ID NO: 36246 - protein, 62 aa, Homo sapiens
ICFATAWRQKIFQRLKTEMKTQVPKMKGSLLLCSLMSHMEGSPPAPQLSGTCWKGSFWNTSS

SEQ ID NO: 36247 - protein, 22 aa, Homo sapiens
MTTLGLLTGICPQTARTWVNMD

SEQ ID NO: 36248 - protein, 36 aa, Homo sapiens
RACSLFSAGVAGSEGSWSAFCRSLWLHAHRLRGYLP

SEQ ID NO: 36249 - protein, 59 aa, Homo sapiens
KRKQEAFAVIPATALANAVPASVASAPRTAQHLPLSPRRPPAASGAPVWFPKKDLQQNE

SEQ ID NO: 36250 - protein, 28 aa, Homo sapiens
LSWLKGLKCFLPWVLWLPSPSVLALWPN

SEQ ID NO: 36251 - protein, 55 aa, Homo sapiens
RLPQSRGLGAGTLLWTTFSLSAGRATQSPFACGWTTRRTTSTRAIAVQGRHQCSE

SEQ ID NO: 36252 - protein, 25 aa, Homo sapiens
MARKCSVPLVMAWLTWTTSRAPLPH

SEQ ID NO: 36253 - protein, 29 aa, Homo sapiens
LARFLLRVMLFLDYSLIWSYWAPGHQGCF

SEQ ID NO: 36254 - protein, 20 aa, Homo sapiens
RMGSDFPWLLHAGTLQVWLL

SEQ ID NO: 36255 - protein, 30 aa, Homo sapiens
LKKPQSHMWRRMTMMSWTASSIISLHHRSP

SEQ ID NO: 36256 - protein, 87 aa, Homo sapiens
KQQPLLFVSAISSAVAKQQPCVSASPSTLARLVSRLAMPAGSSTAWNTASSPMARCQVTRPLGEEMIPSTPSSVRRGLASMCPGQCL

SEQ ID NO: 36257 - protein, 35 aa, Homo sapiens
RWAFRLERTLPRLRKSLVLGGGGAAVAVMATGLGG

SEQ ID NO: 36258 - protein, 40 aa, Homo sapiens
VATGWEWLRGYLLLAACQREEGGGKKKGGGVEGGGPGPGE

SEQ ID NO: 36259 - protein, 10 aa, Homo sapiens
MDMIFFIILL

SEQ ID NO: 36260 - protein, 65 aa, Homo sapiens
LGRRRPASTSGLLPSAACAPPAKSPPSRPHLAPPIPPGWSPLWVPIGSCECLGVGSLFLARGTNF

SEQ ID NO: 36261 - protein, 47 aa, Homo sapiens
LFCHSIKLFSILLSLHLSAIPHLPGRRTRTQDPPGGLTFRRGASWTA

SEQ ID NO: 36262 - protein, 23 aa, Homo sapiens
KEVAGSLCVLQIVTLMVAPVFHD

SEQ ID NO: 36263 - protein, 23 aa, Homo sapiens
MILLVSLHLWTVSIKTVEIINLR

SEQ ID NO: 36264 - protein, 93 aa, Homo sapiens
MRRGGRVPGGSSRRRWRWRAAAAETGALSRTPRPAPRRHPRRSVLFPLCFSPVLGQSCPRSRVGLRVCAGAAGAISPLGGRWSPGARGRDHGG

SEQ ID NO: 36265 - protein, 68 aa, Homo sapiens
LPSQSSLGVAGRSQRCGGAGRTLSGAAAPRVALCVPECRSESQKRGEAKPRALGCFSREDSLPPASGC

SEQ ID NO: 36266 - protein, 15 aa, Homo sapiens
VQTTTFFRLWMCVMT

SEQ ID NO: 36267 - protein, 75 aa, Homo sapiens
LVVRWAVLVFRSSTAALPRAAEAARRSEKWPKTSALGERKWPEPSRLLVSPPVGKPPANSWPRKPPGKALPLPAG

SEQ ID NO: 36268 - protein, 79 aa, Homo sapiens
LFFRRSAVAFLCRSQWKKRSPRWSLTMAPACAKLVLLGTTLPEPCFLPSSGAPDTRASWWAWARRTPTWATRPRASVAS

SEQ ID NO: 36269 - protein, 33 aa, Homo sapiens
MEPKTKMTEITSNSSQTFLVATLGILRFSLACP

SEQ ID NO: 36270 - protein, 36 aa, Homo sapiens
LRGTRSLLRSFCLSIACAVSWTAHGSSAGDAGISGS

SEQ ID NO: 36271 - protein, 24 aa, Homo sapiens
VVLPPGLTSLWFVCLCSASSGAAC

SEQ ID NO: 36272 - protein, 35 aa, Homo sapiens
RDARRKSTSAASPWPALDLPFFVVFFCFSPFFLLN

SEQ ID NO: 36273 - protein, 32 aa, Homo sapiens
TPEGSQPLLLLLGLRWTFLFLLFFFVFPLSSF

SEQ ID NO: 36274 - protein, 14 aa, Homo sapiens
MAFLSWLTTFTPWA

SEQ ID NO: 36275 - protein, 68 aa, Homo sapiens
LFCARVKRFVPAIPWAALGKLAAWPLVWLSGLVPATVYTDWLGEETRTRKSGTKTRSLRTPQRLGLRL

SEQ ID NO: 36276 - protein, 66 aa, Homo sapiens
TQSLGLFGLLPPPGSALRCRGELSARSPWGAPHIGPRCCCCCRLCCCCCCCASRPAAASQDRETHH

SEQ ID NO: 36277 - protein, 69 aa, Homo sapiens
TQSLGLFGLLPPPGSALRCRGELSARSPWGAPHIGPRCCCCCRLCCCCCCCASRPAAASQIPRGAPPSR

SEQ ID NO: 36278 - protein, 40 aa, Homo sapiens
KVLLAGYFIDTLKVLHMIRKQLWKMTAFISLNILPYGTDQ

SEQ ID NO: 36279 - protein, 33 aa, Homo sapiens
IFLSLFDWSMLLRIILIYTWLWNMSLGVKCFHI

SEQ ID NO: 36280 - protein, 25 aa, Homo sapiens
MNLCWKIITLLWVSNCCKKNTVTSS

SEQ ID NO: 36281 - protein, 49 aa, Homo sapiens
LLHLRPEPRSAQDWNAFPSGLSWSLGLGAALLRYNSCACGFGWHNLCLG

SEQ ID NO: 36282 - protein, 24 aa, Homo sapiens
MSCFSSTCSFGSVAAAFWALGSTC

SEQ ID NO: 36283 - protein, 32 aa, Homo sapiens
MAWIMLVILNWPRIRPRNLKRRSWNCISHTGP

SEQ ID NO: 36284 - protein, 17 aa, Homo sapiens
MRLFPYLIIHVLLLIRH

SEQ ID NO: 36285 - protein, 20 aa, Homo sapiens
IKTVMLTFFLMIITVLNSLR

SEQ ID NO: 36286 - protein, 24 aa, Homo sapiens
IGRAVTVVCPGAAGAAAAAGHGAR

SEQ ID NO: 36287 - protein, 75 aa, Homo sapiens
LVLLAFRALVLLDLLGLLDLLASLVRLESEAPRGTLDQMDHRGPQDPLGNLVAREPSRVWKAVRISCVQPTVHPE

SEQ ID NO: 36288 - protein, 19 aa, Homo sapiens
KARRSCLLVIMLLTRTETV

SEQ ID NO: 36289 - protein, 29 aa, Homo sapiens
MTVFPYAFTAVLAVEGLVLFVLLIIHGCC

SEQ ID NO: 36290 - protein, 11 aa, Homo sapiens
LLNILLFSSAI

SEQ ID NO: 36291 - protein, 21 aa, Homo sapiens
ISKNHGKLKSLLGLLKHLLLM

SEQ ID NO: 36292 - protein, 12 aa, Homo sapiens
MLGLFQSALTLV

SEQ ID NO: 36293 - protein, 24 aa, Homo sapiens
IQSPGIIANIIVLLIGSFTYLTLK

SEQ ID NO: 36294 - protein, 9 aa, Homo sapiens
IIMLYLNYL

SEQ ID NO: 36295 - protein, 11 aa, Homo sapiens
MKIKHILLLGV

SEQ ID NO: 36296 - protein, 32 aa, Homo sapiens
MVIMKRWLPWRPKSVIKLSIILATSICHGTSF

SEQ ID NO: 36297 - protein, 13 aa, Homo sapiens
LCILLVLLRLQRQ

SEQ ID NO: 36298 - protein, 34 aa, Homo sapiens
LCILLVLLRLQRNCLLFGLEKRLWRHGNKQQRPA

SEQ ID NO: 36299 - protein, 16 aa, Homo sapiens
IFLRQSSLTWLIWLSV

SEQ ID NO: 36300 - protein, 20 aa, Homo sapiens
LILLVVLLTGELNMYLQESG

SEQ ID NO: 36301 - protein, 38 aa, Homo sapiens
LVYSYHLASVFLGNAAVLMHLVSFWSYSGQAFVTALWD

SEQ ID NO: 36302 - protein, 8 aa, Homo sapiens
MAILILLT

SEQ ID NO: 36303 - protein, 27 aa, Homo sapiens
VWWSCCLVILSTTRWQASLIRPAHTSE

SEQ ID NO: 36304 - protein, 35 aa, Homo sapiens
MTLTENLKKSVRVLKLSVGPKKCPISSLTLELRTF

SEQ ID NO: 36305 - protein, 19 aa, Homo sapiens
IRLLCLVTAMVSARAAQDL

SEQ ID NO: 36306 - protein, 14 aa, Homo sapiens
RKRRFRHRSGPATR

SEQ ID NO: 36307 - protein, 25 aa, Homo sapiens
LKTSMMTCMCSFLVLIQKIIHKSHS

SEQ ID NO: 36308 - protein, 10 aa, Homo sapiens
IYSGYLFLLY

SEQ ID NO: 36309 - protein, 18 aa, Homo sapiens
LVFVLSLVYWIQRFHCFH

SEQ ID NO: 36310 - protein, 14 aa, Homo sapiens
ILTATWSSILLCCF

SEQ ID NO: 36311 - protein, 14 aa, Homo sapiens
IKIRSCLFILYKMI

SEQ ID NO: 36312 - protein, 29 aa, Homo sapiens
ICAFFFIVLFVHFIQLFVQNAKNLDTLHQ

SEQ ID NO: 36313 - protein, 41 aa, Homo sapiens
RLVVTWMIVPVMLKPLIDLITTGFSQDYKNFLKVTTLGITR

SEQ ID NO: 36314 - protein, 39 aa, Homo sapiens
LSNFLFLVWLLWCAKLRTLLFCHTATPYRCGRCEICHQL

SEQ ID NO: 36315 - protein, 40 aa, Homo sapiens
MRPHKPKKKTSICSSICLLWFKNFFNLTSRCVNCDIWECL

SEQ ID NO: 36316 - protein, 59 aa, Homo sapiens
LVRTPLTSVYLRVRPILPAGLCLGVTLPELAPTTVATVMLMCDCCQEPAHMTVWRKFFP

SEQ ID NO: 36317 - protein, 27 aa, Homo sapiens
TCLCLSFLSSVSTGYVSHCQIPDHKSP

SEQ ID NO: 36318 - protein, 12 aa, Homo sapiens
KCSFLTFLLQLV

SEQ ID NO: 36319 - protein, 41 aa, Homo sapiens
KEDDSTSFSFLPSLPCPALLPLLAVVVCQHLAGDFLNLQGE

SEQ ID NO: 36320 - protein, 115 aa, Homo sapiens [sequence omitted]

SEQ ID NO: 36321 - protein, 35 aa, Homo sapiens
MVVEGALGRVVRAPDSSPMQLQNMTNVLKGRLACR

SEQ ID NO: 36322 - protein, 36 aa, Homo sapiens
LDPTMQEGRRLFPAPLATIRTCDLVKTGIKTWAYFS

SEQ ID NO: 36323 - protein, 19 aa, Homo sapiens
MKKPNTWKRVEIMNGVQEP

SEQ ID NO: 36324 - protein, 34 aa, Homo sapiens
VLHRQGQVEHRMVPTIGCLAAALNVAPVNSGMHS

SEQ ID NO: 36325 - protein, 52 aa, Homo sapiens
VYHTWADTSLSSIFTKQRTRRFPRRCRWMAGGHGQAPSMPLFAPMCLAAGIK

SEQ ID NO: 36326 - protein, 42 aa, Homo sapiens
LQKALLPLSLPLSFSLFSLSYIFLLLLIHGDQMMYDKINCKE

SEQ ID NO: 36327 - protein, 11 aa, Homo sapiens
VAGAAFFMSLG

SEQ ID NO: 36328 - protein, 28 aa, Homo sapiens
LVLAAASLCCAHMTHNSGSGPGTSNIIK

SEQ ID NO: 36329 - protein, 51 aa, Homo sapiens
LMILAFPCFPIDLAVLLAVLAHSRWFCHWLPPSACLWDYATAILFYLPSAQ

SEQ ID NO: 36330 - protein, 48 aa, Homo sapiens
LAASLTGAFLTAAHGPHWSPPTASRILPPPSQAGLMSVLTLLPLLPGP

SEQ ID NO: 36331 - protein, 13 aa, Homo sapiens
MYTHTYILIWVSV

SEQ ID NO: 36332 - protein, 79 aa, Homo sapiens [sequence omitted]

SEQ ID NO: 36333 - protein, 22 aa, Homo sapiens
LIVYIHIFWIRTPQLPILALSE

SEQ ID NO: 36334 - protein, 46 aa, Homo sapiens
METFEIFYLKCIRVNLISRQLNTFFLAVLLVVCMPCFHSVCTGKRT

SEQ ID NO: 36335 - protein, 32 aa, Homo sapiens
MAIFFFFCIIVSSLPTAELGTENACSTCLLNE

SEQ ID NO: 36336 - protein, 113 aa, Homo sapiens [sequence omitted]

SEQ ID NO: 36337 - protein, 37 aa, Homo sapiens
LGKHLLSILGTNMLLFPLFLLLSLDLCQKEGYAESLI

SEQ ID NO: 36338 - protein, 63 aa, Homo sapiens
LRLPARSLPTSSAHLGFWVFLCFHLFFFFLNPFSAASQPRVCECQRGIRQQSFFPLCLDPSQG

SEQ ID NO: 36339 - protein, 68 aa, Homo sapiens
LTSIPSKNKRPSETERGGLGLGSRPRCVLKVMCARFRKAAHSRFLGVSAAVGSWGQGPGCWGVGRGSR

SEQ ID NO: 36340 - protein, 161 aa, Homo sapiens [sequence omitted]

SEQ ID NO: 36341 - protein, 85 aa, Homo sapiens
MRECSSDAVTWAGALGLASALVAARPALWSHGLPGRTPRLSPSRPQPPDDPLLPSLSPTVGLAEDGARPGPRGAAQVLGGREPGA

SEQ ID NO: 36342 - protein, 58 aa, Homo sapiens
VGPLLARAWTLAALLLDSHHEAPMLARSLAARRPGAKDTAVSPVPRISPPPKAHPRAF

SEQ ID NO: 36343 - protein, 50 aa, Homo sapiens
LGPRHPKPRDTCWRADGICLAWAGVLALLLLSCRATSDDRLFPLSLSFSS

SEQ ID NO: 36344 - protein, 23 aa, Homo sapiens
MEMYYSLLYLYLYHSAGLTELSL

SEQ ID NO: 36345 - protein, 43 aa, Homo sapiens
VPHVVAVLRGLLLLFLCAKDDVGGGAGSLRRCQRAPGDRWGPG

SEQ ID NO: 36346 - protein, 14 aa, Homo sapiens
MICIYSFVILPAIY

SEQ ID NO: 36347 - protein, 32 aa, Homo sapiens
LTHLLLCWIRASSGLLLSSPRSLMDSTFPTGP

SEQ ID NO: 36348 - protein, 74 aa, Homo sapiens
LSAPAAELAAPNNVSVRLENFHFFPGWFGFGVDFGFVPLLHSPPPPPRPFFFFFLNWYFIFDSPSALTPGSHLS

SEQ ID NO: 36349 - protein, 144 aa, Homo sapiens
LERRRVAEGRAEIFYLLCLCIAGFPAPNLTPPPRTRRRNSAPLFGGRQPRVHGDCRARRVRSRASSEPTRGAPVAGNCGGMAWYESREPVARGGSPPTSKGWRTLETEELEAPVAPFHSSSKYCLFSKYWPSDSALVSPLEGSR

SEQ ID NO: 36350 - protein, 114 aa, Homo sapiens [sequence omitted]

SEQ ID NO: 36351 - protein, 31 aa, Homo sapiens
LLSPMGMARRDLAFRVGRECTESAKDQGGCQ

SEQ ID NO: 36352 - protein, 60 aa, Homo sapiens
MTAFGLGIPTFLVMQPSGSQPRFPALTQNGVALVRTPLTSVYLRVRRPDFAMLARLVLNS

SEQ ID NO: 36353 - protein, 47 aa, Homo sapiens
IGSFFFLPSLFLFLRLVACKKITVRCSPALGARYSAPLSPVHCATQR

SEQ ID NO: 36354 - protein, 164 aa, Homo sapiens
MKRVFWCLGTTILPPTLDIRGGPSHPCPPMLSLPTLGPLTHSPLSSPPPTVSQGTPMAPAPTPKGATHRVPTPKGATHRAPTHKRATHRAPTPKGATPRGHIPRAPSPPTPMDSHRSSQDKTLTHPSMETTRRRVPHPTMTTRTSLPPTGMTRASDRPSSARCS

SEQ ID NO: 36355 - protein, 20 aa, Homo sapiens
KITIMAVFLCLKTVKQERII

SEQ ID NO: 36356 - protein, 24 aa, Homo sapiens
LCSLGMLLCLCIWSLFGATVDRHL

SEQ ID NO: 36357 - protein, 36 aa, Homo sapiens
TRKRRRKRKKRKMLGNIYLTCSTARTLASCCYSCKY

SEQ ID NO: 36358 - protein, 26 aa, Homo sapiens
MVQRHKLKLTAFGANCICSLLGGSRG

SEQ ID NO: 36359 - protein, 36 aa, Homo sapiens
LKQQTMLGLLFHLLLRSPTLMVLERRCRNWEKVKGL

SEQ ID NO: 36360 - protein, 36 aa, Homo sapiens
RRWLFGGSEERLLLLLLLLVAPLQKSSKNSAVGSVR

SEQ ID NO: 36361 - protein, 33 aa, Homo sapiens
RRRKRKKRKMLGNIYLTCSTARTLASCCYSCKY

SEQ ID NO: 36362 - protein, 14 aa, Homo sapiens
KLEIGILISFYLID

SEQ ID NO: 36363 - protein, 14 aa, Homo sapiens
IGRRIVVLFSSLAV

SEQ ID NO: 36364 - protein, 87 aa, Homo sapiens
TTATLLCLLSATALLCSLGHPRPHLLRLPDLPSFPAFLWIPASGHPSPPSLQGPLLVSLLLEPLPPPPSLQNFSFTPHPPPLPPFLF

SEQ ID NO: 36365 - protein, 37 aa, Homo sapiens
KTSMAPMDIVSIVGAEKLEAMTMSTILSKKKQCLRNI

SEQ ID NO: 36366 - protein, 22 aa, Homo sapiens
VVAKRSSERFRKLVVALKITLR

SEQ ID NO: 36367 - protein, 27 aa, Homo sapiens
LLPPPLLLLLAPSLHQPEALCFPSWIC

SEQ ID NO: 36368 - protein, 21 aa, Homo sapiens
MNRHNPRSNHFTVYHRSQVCR

SEQ ID NO: 36369 - protein, 64 aa, Homo sapiens
LLLLFMSVPVVSAPPFCPPAEGSRDGRPKASVARPAAVHEHHSPRDCGHLPDVLRSSLGGWQPH

SEQ ID NO: 36370 - protein, 29 aa, Homo sapiens
MQTMTILRAPGNRTQNSSPENPDANSLKW

SEQ ID NO: 36371 - protein, 20 aa, Homo sapiens
IQRRGEESLVYVLLMYTTGS

SEQ ID NO: 36372 - protein, 44 aa, Homo sapiens
LPVALTATLASGAGHGRPPPDRPAPVLTALALAFEPEASSARTT

SEQ ID NO: 36373 - protein, 32 aa, Homo sapiens
MGLCWMRVLLTQVYTSISGQQKRRMTQAWCIK

SEQ ID NO: 36374 - protein, 9 aa, Homo sapiens
MFLCVLHLL

SEQ ID NO: 36375 - protein, 58 aa, Homo sapiens
MSLSLTVVSFHTISLVWLGKNLRCYILASQTGDSRKGVIFLYQSNASRGRSYICHFTA

SEQ ID NO: 36376 - protein, 45 aa, Homo sapiens
TFTFLHRNNGRTQGVAFWSQGSSGCPAPLHPHSPLLLPTASPLGR

SEQ ID NO: 36377 - protein, 32 aa, Homo sapiens
VVYFCNVKTSALFSLFVFFVNIWVYIKRQDVQ

SEQ ID NO: 36378 - protein, 19 aa, Homo sapiens
LGTRRQETLFLLSSFLLVG

SEQ ID NO: 36379 - protein, 30 aa, Homo sapiens
LSWGSLFAAAAAAATAVLGARSPGKKPSHV

SEQ ID NO: 36380 - protein, 54 aa, Homo sapiens
VTAGGAGPGAQRGGLWRSEGRRCFVAWTLVSALEQAGAWSAAGPPWSPRWARAS

SEQ ID NO: 36381 - protein, 123 aa, Homo sapiens
MGQRGAVGPPAALGVEGGAAPAPLTLACPSSRYFLDSTSETSLMPKTWISWAEIRSHTSSLSMSHPSLCCRISPTFASRSLIPLRYPSKSTSKNVSTSSTAAALMGGTALCTALQASLAAPRL

SEQ ID NO: 36382 - protein, 33 aa, Homo sapiens
MDLLLLMEMRLSHISLAPLWNLRQPPPQTLTRL

SEQ ID NO: 36383 - protein, 27 aa, Homo sapiens
MASPLHLEDAIWRGQGRVADPLQAPAL

SEQ ID NO: 36384 - protein, 100 aa, Homo sapiens
MPPLQPSEERSYPDGPNAPGIDGVSAALSCSGLVCGITARKVLRGNPLHAVWCVKNAASSSLLLFFAEKQNSRAQGNWRGEKAVSWSPGAVSLHAPLLGL

SEQ ID NO: 36385 - protein, 18 aa, Homo sapiens
MANSLLMTGLDYTSCWPS

SEQ ID NO: 36386 - protein, 53 aa, Homo sapiens
MTPVRTSCASHSTVHWALCRTEKRKRVLRVPLAVITSSGCLCLTLGCRLHPAS

SEQ ID NO: 36387 - protein, 55 aa, Homo sapiens
MSATSLQIPKPSSSMNQISSSSHFYQRSNCFSFPLTWLCIRTGYRTLGPEVLERM

SEQ ID NO: 36388 - protein, 55 aa, Homo sapiens
MSQELPAAGHTTAFICALGPGLLLSLPSIGAQHPLPAHPSDSNSSPAPRPCVHFS

SEQ ID NO: 36389 - protein, 64 aa, Homo sapiens
LSPSLLPDTPCCPLSCCSGSEAQLVTPRRILFLFLFLFWPTAAAMALSSSAGVHPASWVPELPV

SEQ ID NO: 36390 - protein, 15 aa, Homo sapiens
LSLVFYSPWLLLISR

SEQ ID NO: 36391 - protein, 37 aa, Homo sapiens
ILTLPLSSRTTFGWTSPSLLAGVCGGAMGRTSTSLRH

SEQ ID NO: 36392 - protein, 30 aa, Homo sapiens
LPLNGDFRRMLSLPGMPRCYFGKADIPRKQ

SEQ ID NO: 36393 - protein, 18 aa, Homo sapiens
TSFYGQKVPFSSSASVVA

SEQ ID NO: 36394 - protein, 24 aa, Homo sapiens
LRLSVRMILSPRFDLGSPHGENCI

SEQ ID NO: 36395 - protein, 29 aa, Homo sapiens
LVRDAVSCVIPVIALQALSPSTWSLCPGR

SEQ ID NO: 36396 - protein, 53 aa, Homo sapiens
LGPALLLAPRSLPGHRLTRCLLLGETSFLPATAAASATGHRPCPGSPLAQTPT

SEQ ID NO: 36397 - protein, 48 aa, Homo sapiens
LLLLTSALRLFSIGVEAPPVLSCLWREANLPLDQREEKAETGSNAVDW

SEQ ID NO: 36398 - protein, 39 aa, Homo sapiens
VGRVAGSGGDSLGFRGLLFLVLLLSSLFPVWPWLTLKTL

SEQ ID NO: 36399 - protein, 54 aa, Homo sapiens
MAPESGGSVASLSLSVADAMVSCLSSWSGLDQCLPGRQVRSWEVPAVLHAELPL

SEQ ID NO: 36400 - protein, 32 aa, Homo sapiens
LPSFVVSQRCAGLLLAALRIQGVGCQVQDLQL

SEQ ID NO: 36401 - protein, 32 aa, Homo sapiens
MIVFLLQVLLMFKIACQLLSHEFSNKKMKSLC

SEQ ID NO: 36402 - protein, 73 aa, Homo sapiens [sequence omitted]

SEQ ID NO: 36403 - protein, 15 aa, Homo sapiens
ISRALAELHLLAFLA

SEQ ID NO: 36404 - protein, 52 aa, Homo sapiens
RRSATAATIYRSSDSSRSDVPTVPATGRLWCTAAAGSTSAASTVWYSVFSKL

SEQ ID NO: 36405 - protein, 43 aa, Homo sapiens
MEMMIYKLRRKIRIFLLKQKMNYFLMNCLLLKNSLLFCLKILS

SEQ ID NO: 36406 - protein, 21 aa, Homo sapiens
VLPFLFSAARKFSLLYMCLCA

SEQ ID NO: 36407 - protein, 36 aa, Homo sapiens
IPCFCCCCWLLLFLLLLFSMSVVVRRKHQLQRVQSS

SEQ ID NO: 36408 - protein, 129 aa, Homo sapiens
RMSEHRNEALGNYLEMRLKSSFLRGLGSWKSNPLRLGGWTILLTLTMGQGEPGGPQGDPWVPHELLLPSLCDSSHASSWGSGSITCAWRGGDSSSHPLVSGHILSNSPVAAVMCSSMGTHLSPFKGTLL

SEQ ID NO: 36409 - protein, 49 aa, Homo sapiens
LEPTPTSQTGQGAHPFMLLWLLMLGRSASFCSVADKLQWTLAQRTGPHP

SEQ ID NO: 36410 - protein, 54 aa, Homo sapiens
RGDHEVEQWALPSDTSVVLLGVGLAVVVSLTLTAVILVLTRRCRTASHPVSASE

SEQ ID NO: 36411 - protein, 31 aa, Homo sapiens
IVISRLALARAAAAAAAAAAAGAARKPVAVT

SEQ ID NO: 36412 - protein, 114 aa, Homo sapiens
VASCKESLRGPKSAALLLAFASSSSRFPTVKSQRHLQRPPGPTETDPQRLARSCLLHREPPSTGEGLAGGVGRWRRRHGEVPEGRPGRCRSYVTLPLLHGPVSVRRWETRRPNP

SEQ ID NO: 36413 - protein, 25 aa, Homo sapiens
MPGPVHIALLASLNPHSFSLGSLWV

SEQ ID NO: 36414 - protein, 85 aa, Homo sapiens
TAGAAAGGGSGGAGSGDRWWFPSLARGGERATPPGPLKGRGFFFFFKAILEVFSCGRSAPLLLLSPLSPTPSGLILFKIFSPILR

SEQ ID NO: 36415 - protein, 56 aa, Homo sapiens
MWVQPWEHCGSASQEPWRSRSLKTQWWHWWAPMPPCAAPSPLSLASAWHSSTSSGS

SEQ ID NO: 36416 - protein, 35 aa, Homo sapiens
MHARKIGLDLITALSPLVSLCQIFSAPFHTGIFFS

SEQ ID NO: 36417 - protein, 12 aa, Homo sapiens
MFYEMHVWLLIF

SEQ ID NO: 36418 - protein, 29 aa, Homo sapiens
ILFLSPQLLLTRRPPAASATPPGRFHRIS

SEQ ID NO: 36419 - protein, 48 aa, Homo sapiens
MGGDHACQGAGAAAVLNRSLYSRQLAMTVSTNGSFLLVLFPGAGMGDS

SEQ ID NO: 36420 - protein, 16 aa, Homo sapiens
IFTKFFIFFVNCWGWT

SEQ ID NO: 36421 - protein, 35 aa, Homo sapiens
ILIPSPPHFFNQVSLLLPFFFLLFSLIYYESGAEV

SEQ ID NO: 36422 - protein, 57 aa, Homo sapiens
VGSNPMAASRGGCLQLLQPQWACVTCALLVLLSVGSLCSSAQLDPLPYCKDRGLSVS

SEQ ID NO: 36423 - protein, 63 aa, Homo sapiens
IFIFILVFLLLFSSFVFFFSLETGSSYVGQAGLESPGSSDPPASASGKVGLQARIAAPGQSLF

SEQ ID NO: 36424 - protein, 73 aa, Homo sapiens
TVRFLPSAAGRVGSPWFRPAPPSWSPFSRWAGLSGGDCLPGLAIGLLMMFDPAAGIAGNVISKLGSASVSSLV

SEQ ID NO: 36425 - protein, 46 aa, Homo sapiens
LPPALTLPLVCCSSRSAGPETLQQGCGLLVHRRHHLHIALWIPPIL

SEQ ID NO: 36426 - protein, 91 aa, Homo sapiens
RNSEEFVQCHSPVINGTKIFLLMGQDGIVKWLFTVNCNTILFMDLFAYFSLHRETFLPWLRTHSWIEPTGELSGKHLANFFFFEMESCCVA

SEQ ID NO: 36427 - protein, 50 aa, Homo sapiens
LVRNFLFLPSLRLQCLMGLPVGGSVFAVPGRSGEPWEEVLRRPSLGSPQD

SEQ ID NO: 36428 - protein, 30 aa, Homo sapiens
LAGSLAAAPQSAAAAAACGPGGWEKRSVGN

SEQ ID NO: 36429 - protein, 34 aa, Homo sapiens
MAMLMLSMVSLLQTFIYTLREKNVSAVTGSCFGG

SEQ ID NO: 36430 - protein, 30 aa, Homo sapiens
RKRFKYYAVATGFLLWNVCICWLVLPQLCY

SEQ ID NO: 36431 - protein, 59 aa, Homo sapiens
MAFMLLILNTASVGKEAFVFDLSIRGSSHRNARGKRTLPYSHLMLQTMFMVIHTFQNEP

SEQ ID NO: 36432 - protein, 46 aa, Homo sapiens
LGLTCLFLLLATSQSQDGCCDSGSCPNSRQQEGHGAAPASSCLPIP

SEQ ID NO: 36433 - protein, 27 aa, Homo sapiens
LLLFLLLLFSMSVVVRRKHQLQRVQSS

SEQ ID NO: 36434 - protein, 32 aa, Homo sapiens
LQSWKREGLKGPLYIFCLSLSLCVLIIICVLI

SEQ ID NO: 36435 - protein, 28 aa, Homo sapiens
RTIFLGMLVLEASGPRSVFGLIDPRFSG

SEQ ID NO: 36436 - protein, 60 aa, Homo sapiens
LIFLDRRGDHEVEQWALPSDTSVVLLGVGLAVVVSLTLTAVILVLTRRCRTASHPVSASE

SEQ ID NO: 36437 - protein, 114 aa, Homo sapiens
ILSSRLGTPGSLTAAAAASASRTIGSLGNNSGGRPQRGSGSPCLRGSGDSSRPPPPGRTASVVPACNASAGEWLLLCPSWGPSQDQSANSIPPAGRSRGAGTKPAASSRADPGT

SEQ ID NO: 36438 - protein, 83 aa, Homo sapiens
RTKSHGHADRVPRETVSVGMCAWLCTWVCSARESTWRLLGAMFGEGGVPAAWRASVPVAPCPGTAACTSRAAFGGWGFCHFRV

SEQ ID NO: 36439 - protein, 65 aa, Homo sapiens
LEPARRSGRPRLCPLLLLTARARGTSSRGCFGCRGRWSLWILHGTSWLWPSPARPCFPFLTSRTI

SEQ ID NO: 36440 - protein, 48 aa, Homo sapiens
IWWVYQGFLLLLLPQFLLLPPCKKDLLPPTMILSPPQPRGTISGGFFK

SEQ ID NO: 36441 - protein, 29 aa, Homo sapiens
KSKAKSQGSPWLMYLGLLWSTLPSCHPVE

SEQ ID NO: 36442 - protein, 50 aa, Homo sapiens
LDVAVLPKLFSVEDVLEGSSLSMLDFQWQLQWPFMWLAVSLVVTSTQLCL

SEQ ID NO: 36443 - protein, 54 aa, Homo sapiens
RTKSMTSRWRSRICGWRTMGVTAVRSLTGWRMKAVWWSWSCGDGAVCPHISPTC

SEQ ID NO: 36444 - protein, 178 aa, Homo sapiens
RRLVGLAGLSDAARVAVCELRVDCVVTGVPLSRPVAGERGCVVRGGGGTNAVRAGRPPQGPWPPARASTSRTPRSTCGTSSSWTGPRAAPVQRAHGHPVPTMGTSMDFWSQTRSAQVIVPQQTRLVFGPCHPLTCKRSRSSVSQEMIAPPALGFWPRRWRLWLAVTLAFQARPGEATR

SEQ ID NO: 36445 - protein, 34 aa, Homo sapiens
MRLTACGSWSCVRSVRSLSPRKPWRSTASLSTSR

SEQ ID NO: 36446 - protein, 62 aa, Homo sapiens
LRRLMLPPATVWRIWPHWCTSMSPASCTPCASAMALACCTRMLAPACWFLAPVGPLLCTLRR

SEQ ID NO: 36447 - protein, 29 aa, Homo sapiens
LYSRQLAMTVSTNGSFLLVLFPGAGMGDS

SEQ ID NO: 36448 - protein, 53 aa, Homo sapiens
KRSPRWSLTMAPACAKLVLLGTTLPEPCFLPSSGAPDTRTPTWATRPRASVAS

SEQ ID NO: 36449 - protein, 30 aa, Homo sapiens
LRRLDLLVLTHLTSTIQQAAMTPQLSLPLT

SEQ ID NO: 36450 - protein, 28 aa, Homo sapiens
MAALRALLLWAPGAGGTPRMRTLRMCSA

SEQ ID NO: 36451 - protein, 81 aa, Homo sapiens
LKLSFSTLLILCFCWSAYHLMASKTNAKFLSDYAALPILKTLAESLAPFKGLIINCLSGRPPMRLHLCGYTLLVWTLSKFR

SEQ ID NO: 36452 - protein, 26 aa, Homo sapiens
MFAKAAKIPAGKASSVMKRNSKDSTE

SEQ ID NO: 36453 - protein, 40 aa, Homo sapiens
MRHILLPPCTSASRTSLGRAWPKASYQQHHQGTLELSCQN

SEQ ID NO: 36454 - protein, 39 aa, Homo sapiens
MAQVDSGLELSWGSLFAAAAAAATAVLGARSPGKKPSHV

SEQ ID NO: 36455 - protein, 9 aa, Homo sapiens
MVLFFLKLW

SEQ ID NO: 36456 - protein, 32 aa, Homo sapiens
LELEKQIQKLSSMTFLLFAFGLASFIFLIHRG

SEQ ID NO: 36457 - protein, 14 aa, Homo sapiens
MAQAFGGTGRQTWE

SEQ ID NO: 36458 - protein, 52 aa, Homo sapiens
LSLCSKTVNSLLSLLHLFHSFSHCVTALQRPGSWRGTLGVASLLFAYTEKAM

SEQ ID NO: 36459 - protein, 16 aa, Homo sapiens
LGLAEVEDLLLSRPRN

SEQ ID NO: 36460 - protein, 96 aa, Homo sapiens
MARSCLSGKVGSVRPDMEKGLGHRQILPSQSGGGGLGRGTPPVGAKSKKKMTLISQPRAGRKGGVGGSGTLPVLSHPHSPGPQSRSHKGCESPGIM

SEQ ID NO: 36461 - protein, 29 aa, Homo sapiens
MAMRWARACRVGLLGGSGARPGGYPPLPA

SEQ ID NO: 36462 - protein, 127 aa, Homo sapiens
LMSWQHLSPFTPGPEPGQPTMGMLCFCSPSFTMPVSSPPRWGLGGMDRQRMSSTQGLQDLPVAHSARLSTTTPAKEDSIWQSFFQVPSYTCASAFLSWMMVFSLFLSLLSLTALVFHVAHPLSSVNL

SEQ ID NO: 36463 - protein, 31 aa, Homo sapiens
LLLSLARASSRAKTMKWTMIYEALSEQMSCK

SEQ ID NO: 36464 - protein, 65 aa, Homo sapiens [sequence omitted]

SEQ ID NO: 36465 - protein, 134 aa, Homo sapiens [sequence omitted]

SEQ ID NO: 36466 - protein, 82 aa, Homo sapiens
LWPDLPVSAQQALGTPRWELLRAALVLGSSRVSCALMLLLPSPGGGAGPVSWNWTDLGLFTCPMGAGAPILGSQPGNTKDSL

SEQ ID NO: 36467 - protein, 69 aa, Homo sapiens
LGQPLPAARRRHLARPLLAALRLRLLGLGLGFISRLTSSQSRASSVGFMSLFDENEDTKKLQSKISSSY

SEQ ID NO: 36468 - protein, 35 aa, Homo sapiens
LGSAHHAPLMFAVWRALSLAVETSVTLGRVYFFDG

SEQ ID NO: 36469 - protein, 64 aa, Homo sapiens
LRQKTSAAFSMGCSTFFIAHPGNSQASSICILAAACTLGDSGATVWDRAHWQGTGGCWQASGHG

SEQ ID NO: 36470 - protein, 26 aa, Homo sapiens
LPQMQKETIAIIITTIIIFLLCRWKG

SEQ ID NO: 36471 - protein, 25 aa, Homo sapiens
MGLRKPPGSLLLGFLLFCACISVDS

SEQ ID NO: 36472 - protein, 17 aa, Homo sapiens
LPVELVFLFLYNVCTLN

SEQ ID NO: 36473 - protein, 24 aa, Homo sapiens
MQHRRLPFSVVLLPQFVESGVSMQ

SEQ ID NO: 36474 - protein, 37 aa, Homo sapiens [sequence omitted]

SEQ ID NO: 36475 - protein, 34 aa, Homo sapiens
MIYRQPFIKVDQGRTRWLNVCNPGTVGGQSGRIA

SEQ ID NO: 36476 - protein, 52 aa, Homo sapiens
LDEFQILLACFLILICLYTYTLCTKLFLIHGLLNPQMWSPWIRKARCTLNDK

SEQ ID NO: 36477 - protein, 107 aa, Homo sapiens
LSGQPLESLGAALLLTSHTFASSLCSQLEGHECPWAVVSGRGPDTATLLPGGRGADACLILPEDGATGGCGIRAPCPALCLPAQAGHSAGRPPSAAHRGQPCGQEPL

SEQ ID NO: 36478 - protein, 29 aa, Homo sapiens
LIWKTLLNFCYQLHSVMLTLPVHSMVVRS

SEQ ID NO: 36479 - protein, 66 aa, Homo sapiens
VSHRSWPEISSLLCLLSVIQLQKKLPRKPGPRVKRRNGHKSPVFLHSVGFMHLYPIKCPWTKPETR

SEQ ID NO: 36480 - protein, 54 aa, Homo sapiens
MASLMSWEPVLLGKVTSDLMGAQMCVCLSVCLCVCVHSRPLTASKPGVASRPCH

SEQ ID NO: 36481 - protein, 57 aa, Homo sapiens
LGLLLLALLLPVQVSSFVPLTSMPEATAAETTKPSNSALQPTAGLLVVLLALLHLYH

SEQ ID NO: 36482 - protein, 85 aa, Homo sapiens
LEDSFSGCPRDFAAQHPCSISSCNISAEALLLLATLPSILWFRCLLLLLKMEFVFLSLKSFLLLDYFQKMKGGLLTLCHLQTRRS

SEQ ID NO: 36483 - protein, 98 aa, Homo sapiens
VCACARVCVLGVCVLGVCRGAERRAGPRGRKEAVELPGLGLRLPSSALLPVRSDAAAAVALSAPRWGRGAQAGSSENPLRRLPVPAGLRMPGRLICTY

SEQ ID NO: 36484 - protein, 33 aa, Homo sapiens
VLHLLLCASQLLLLKQLSLLFGFLRLLASERHL

SEQ ID NO: 36485 - protein, 19 aa, Homo sapiens
RDRAVHELQAVLLALVLGR

SEQ ID NO: 36486 - protein, 12 aa, Homo sapiens
IKISFTVMLLLT

SEQ ID NO: 36487 - protein, 28 aa, Homo sapiens
MTNLMIFDLFSPVLILKAPSFFFFFFFF

SEQ ID NO: 36488 - protein, 24 aa, Homo sapiens
MLAVAGAVIFISSFLKHRSRNGSK

SEQ ID NO: 36489 - protein, 12 aa, Homo sapiens
IIVVVLNLALRA

SEQ ID NO: 36490 - protein, 74 aa, Homo sapiens
LQLKPLPLLQAPPGPADHSSPQQWSHMTPPTWTLSSDTLSSRLFTASSLCSGSLLMATCCGSLPACTLARNSMR

SEQ ID NO: 36491 - protein, 33 aa, Homo sapiens
IFFLSSSFLTTLIVGRSKCSFILVLVQVQELKT

SEQ ID NO: 36492 - protein, 33 aa, Homo sapiens
MNKARNSCLFSVLPLLLSLTTSVNITSQLLLQL

SEQ ID NO: 36493 - protein, 24 aa, Homo sapiens
LSQKIFLSLLLQSQLRLGTSTAEW

SEQ ID NO: 36494 - protein, 35 aa, Homo sapiens
MTTESTAYSGIKTVAVYIVVQMINILWNGTYRHAK

SEQ ID NO: 36495 - protein, 71 aa, Homo sapiens
LDRLLHIRPRNGPLEKGFFKPAALSSVLASGIAFPGNLASDIAHHPALFTVPGSSWRNDISENADSYVHVI

SEQ ID NO: 36496 - protein, 41 aa, Homo sapiens
IFLWLLTGSYYKALCMDTIFLYYTRKECTYHTQGEKCSFGC

SEQ ID NO: 36497 - protein, 16 aa, Homo sapiens
VSFISVTLMCLVYSRQ

SEQ ID NO: 36498 - protein, 44 aa, Homo sapiens
IISKTATGNYMTLQARVGIAVIISVTAVVSHFILYCVVLCHQKQ

SEQ ID NO: 36499 - protein, 26 aa, Homo sapiens
IVYLPLLLLSYNAWKQEMGSAAANRT

SEQ ID NO: 36500 - protein, 19 aa, Homo sapiens
LWGSLCPLLFHCFQLVVVG

SEQ ID NO: 36501 - protein, 24 aa, Homo sapiens
MLWRLCCFALSTAYSSGPHCFYEL

SEQ ID NO: 36502 - protein, 36 aa, Homo sapiens
MCPISLFSVLPPYPSPSSAWKRTMAWTSASPDSCSP

SEQ ID NO: 36503 - protein, 54 aa, Homo sapiens
MKSIVGLGVIWIRGTSAEAVVMRNTLLFKMAIQIILNTVYLFYLDYQQRLKHEM

SEQ ID NO: 36504 - protein, 14 aa, Homo sapiens
LIFRSFSVLLSVVV

SEQ ID NO: 36505 - protein, 104 aa, Homo sapiens
VKGVGFFLCVCVCVSGEIFHYECFTKVNFFLFASFVFGSFFFLPNFGFISRRIWLWGKRKKSRITRSTTTNNNKNHQDIFLQISDGFKFMKQLSPFAISIWISE

SEQ ID NO: 36506 - protein, 62 aa, Homo sapiens
VRAVGCALSAGLGPGHAPPSPAPQAGARPRIRSSRASLGRPARNHPLRCLLFRDGEVGKRLL

SEQ ID NO: 36507 - protein, 17 aa, Homo sapiens
MGPCALLTWAVLVFKPA

SEQ ID NO: 36508 - protein, 86 aa, Homo sapiens
TRPHPAARAALSSAASALGAFSQKQSRRARWFLSARKSPELTTGRSATARGPKPQKDDGRVMKLSPGLLGRRECAGAAWERREECR

SEQ ID NO: 36509 - protein, 42 aa, Homo sapiens
LFATFISVDFFFLVCVVVVFKCGGQKEIPSQAQSNPSPKRLF

SEQ ID NO: 36510 - protein, 29 aa, Homo sapiens
LRFLVFIVVLSSHETPLEDMCLSGASALH

SEQ ID NO: 36511 - protein, 34 aa, Homo sapiens
LLGLPAAGASTLCVCLAAAVACSDWLLGPSRSEH

SEQ ID NO: 36512 - protein, 57 aa, Homo sapiens
VCSEMTSLSRCCRRCWGWSLSSGFWAMALPCGFSVSTSSPGNPAGFSCSTWQWLTFY

SEQ ID NO: 36513 - protein, 52 aa, Homo sapiens
VCSEMTSLPRCCRRCWGWSLSLGFWAMALPCGFSVSTSSPGNPAGFSCSTWQ

SEQ ID NO: 36514 - protein, 42 aa, Homo sapiens
VTIFGCPSREKGSAFMFQDATGVILFNATILPISLTLSTTQY

SEQ ID NO: 36515 - protein, 10 aa, Homo sapiens
LAALTFLLAG

SEQ ID NO: 36516 - protein, 29 aa, Homo sapiens
TAGAGALLLRGQAAAGAAAAAAARSSHAE

SEQ ID NO: 36517 - protein, 45 aa, Homo sapiens [sequence omitted]

SEQ ID NO: 36518 - protein, 28 aa, Homo sapiens
MLDFQWQLQWPFMWLAVSLVVTSTQLCL

SEQ ID NO: 36519 - protein, 66 aa, Homo sapiens
ILAFSRRSSPVVGSLAWLSPAGSNGQAPVVSGLSASSCVAPSSWPTCVETGCSRWWDTLPWIQTLI

SEQ ID NO: 36520 - protein, 36 aa, Homo sapiens
MLTIFFLPLATSLPTCFLSTLVQLFLQRPRSSELHI

SEQ ID NO: 36521 - protein, 56 aa, Homo sapiens
MPVKARALVFLFLWSAAEMTATAPSQYIYMSFLWTSAPFKIKAGTQMWGWKWSSPF

SEQ ID NO: 36522 - protein, 32 aa, Homo sapiens
TTAAAAAAAATAFCAGGGGGRSGEHGPRGAGR

SEQ ID NO: 36523 - protein, 12 aa, Homo sapiens
VALTGLALGCSL

SEQ ID NO: 36524 - protein, 66 aa, Homo sapiens
LSRTPRPAPRRHPRRSVLFPLCFSPVLGQSCPRSRVGLRVCAGAAGAISPLGGRWSPGARGRDHGG

SEQ ID NO: 36525 - protein, 34 aa, Homo sapiens
MSHHGRPCITPLCSLPHAAQPELHSQVSGASLLI

SEQ ID NO: 36526 - protein, 18 aa, Homo sapiens
LFLFLAAAAGLVVLHLRG

SEQ ID NO: 36527 - protein, 37 aa, Homo sapiens
LSACVCCRVLSLHWCASGQAALLGPGPCLPTPPPSWA

SEQ ID NO: 36528 - protein, 13 aa, Homo sapiens
MMGIPPVLLLLFS

SEQ ID NO: 36529 - protein, 28 aa, Homo sapiens
MKPPSLFLPLTALEPRSQAGHGSGVLQG

SEQ ID NO: 36530 - protein, 55 aa, Homo sapiens
LLSLCQRKIPWRMPHNHLEGDALLRVPVLCIWRAWLRAEVGGRAPLPGRSVGHRN

SEQ ID NO: 36531 - protein, 29 aa, Homo sapiens
LGSLERGLLKITAAAFGLGSVLSACARTG

SEQ ID NO: 36532 - protein, 95 aa, Homo sapiens
MFPRHHRRKLRRLTALTSAVNSAHLASGATPASAVTSTTVATGWRSLVGTTNTSMSAVAKISSTSTTCSGLPPSSTLLACSWASSLPLSLEALRT

SEQ ID NO: 36533 - protein, 45 aa, Homo sapiens
MRKRKRKKRRRRSHPQNLLSWSTISPTNSKITSSRSQSSVMSVPG

SEQ ID NO: 36534 - protein, 72 aa, Homo sapiens
MAIKGLSFLLICLDKQQSPFGCLLVRIFLKVSCTFPCFDEWNGRAGFNCLMATVLGKCQNLHVSHPRATGRV

SEQ ID NO: 36535 - protein, 109 aa, Homo sapiens
MTNPFQAWFKLKLKLCLRFSSREVLIVSWLFLVYWLRNCALEGRGVLRMGQLMEGEWKTLVAQENMSTSVHHCNSGLIIIFSASVSTNETMPLNHILCCLQYFPPLRHL

SEQ ID NO: 36536 - protein, 38 aa, Homo sapiens
TSACVRAGFVAAAARAGAFAGLVAPAHFYSSPVLLFRI

SEQ ID NO: 36537 - protein, 88 aa, Homo sapiens
LCLGSRSGRILALLAFLFQKTRNRPAGLRDLKRDCYSLFSGSGRGSLSRSVERGEGRIPCDRLWLSWARAWRRYVESLSRRHFWLPTC

SEQ ID NO: 36538 - protein, 49 aa, Homo sapiens [sequence omitted]

SEQ ID NO: 36539 - protein, 26 aa, Homo sapiens
LTTSFLSFFCFFLPAVISVSSFCHTA

SEQ ID NO: 36540 - protein, 13 aa, Homo sapiens
LLMLIVIGVFASN

SEQ ID NO: 36541 - protein, 18 aa, Homo sapiens
LCLCAGLLVLLPSCRCSS

SEQ ID NO: 36542 - protein, 81 aa, Homo sapiens
MWPLQHISVASVSVVSFLCLAPHGFKSTRAGVETAHLALILSDWWFWPVSRYLSIGKAALRCGGHPDSHRLHSRNGSMRLY

SEQ ID NO: 36543 - protein, 64 aa, Homo sapiens
MTSLSIPSQNCSKRLLSSSLCSSSSRILQSSSTSSSFSSCSSTPSSSRLAWSTSYSISSKGPSS

SEQ ID NO: 36544 - protein, 12 aa, Homo sapiens
MTHPTTFPGASN

SEQ ID NO: 36545 - protein, 66 aa, Homo sapiens
MPEDLLFLDAAAQGLYFMLWLLSFELSVAVSELLRFTGPWRILSYTVHWVLDMQSVPFIAFLENNN

SEQ ID NO: 36546 - protein, 57 aa, Homo sapiens
MSLQALSRASSMRTAFSGAENAWITSARTTARQKHPREASRVGVGEQTAGPAESARN

SEQ ID NO: 36547 - protein, 47 aa, Homo sapiens
MPRAAAPSVAAAAAGAQGAAAAVRWGRQREAAGRAAGAGAGGAARPA

SEQ ID NO: 36548 - protein, 119 aa, Homo sapiens
MTGDFFRVWLLQHTGLRQHPAPAAWAAPVTAGARSLQSVSSAAASVNLNQRHLAAFSATLFRSGSKPRDQETSCLSAGTQARRQEARLTPCLRLPEERAMRKAGLSSQDTREKPQATAP

SEQ ID NO: 36549 - protein, 58 aa, Homo sapiens
MWFQNWSLPSPADSGLGDDTVFFLQSPWNRLTAYDLIGDLYMGPTPIFPQETHTLIKG

SEQ ID NO: 36550 - protein, 34 aa, Homo sapiens
MRARRAPCLQSLGTGAPAPPLGSPPKRDLRSVDP

SEQ ID NO: 36551 - protein, 43 aa, Homo sapiens
MNLIKKRKSSPTLSFSAQNPIRKTCSGPLSSLTSPTRGESGIL

SEQ ID NO: 36552 - protein, 22 aa, Homo sapiens
MRPFCLQPPRPPAYRSRPAAPC

SEQ ID NO: 36553 - protein, 28 aa, Homo sapiens
MFISLWFICPRIFTAMAGTKGKRWSPTS

SEQ ID NO: 36554 - protein, 24 aa, Homo sapiens
MYPTFKPLSVQLAKFPAEDSLSDG

SEQ ID NO: 36555 - protein, 25 aa, Homo sapiens
MEHLLYILGSVLGHENEVINRSLSL

SEQ ID NO: 36556 - protein, 68 aa, Homo sapiens
MIQPLQRPPAATPAACAGAAAVAAPGTKSGGARGRPPGRASCSPSPAVKYVPRQVLRRCRAGRSLLTS

SEQ ID NO: 36557 - protein, 57 aa, Homo sapiens [sequence omitted]

SEQ ID NO: 36558 - protein, 16 aa, Homo sapiens
IFTLRKGIPRLIFFLL

SEQ ID NO: 36559 - protein, 17 aa, Homo sapiens
MKLVFLGGDFSIVLSMC

SEQ ID NO: 36560 - protein, 14 aa, Homo sapiens
MEMVYLMLKMSLVF

SEQ ID NO: 36561 - protein, 23 aa, Homo sapiens
MRAWLTATSASQLQVILLPQPPE

SEQ ID NO: 36562 - protein, 25 aa, Homo sapiens
LRPLLAAVNSFGQLMIFIIVPSFYK

SEQ ID NO: 36563 - protein, 32 aa, Homo sapiens
LDLLASVLRLVSSSAGALATRPARSPQRSGRV

SEQ ID NO: 36564 - protein, 16 aa, Homo sapiens
MKTRKQIRLCIIGWFL

SEQ ID NO: 36565 - protein, 46 aa, Homo sapiens
LLVFRRTLSNLLYMPLLRGLLWLQVLCAGPLHTEAVVLLKQKVWCK

SEQ ID NO: 36566 - protein, 15 aa, Homo sapiens
VSAGSSLLACSLLLA

SEQ ID NO: 36567 - protein, 53 aa, Homo sapiens
LLIFFSWCVWWLFLSVEGKRRYHPRLSPTPLQNGFSDTPGSEGVGSPGCARSK

SEQ ID NO: 36568 - protein, 45 aa, Homo sapiens
LTPGELSLPPRCRPIFRGRKMPSNAPTNFLRLAKSSLLWMFFMML

SEQ ID NO: 36569 - protein, 27 aa, Homo sapiens
LKTTRIEHVLLNFLGSSLLIIQLTLLA

SEQ ID NO: 36570 - protein, 81 aa, Homo sapiens
RKYQSLCKQSLVYSCLHQSTVRFMKKNKLRTTLYVHLQMPQLMLVGCLSAFCDNEHMDFCLLNSVDPFSQLPGAWIFTSNC

SEQ ID NO: 36571 - protein, 39 aa, Homo sapiens
KAILEVFSCGRSAPLLLLSPLSPTPSGLILFKIFSPILR

SEQ ID NO: 36572 - protein, 19 aa, Homo sapiens
LGTVLLQALLLPSAATQER

SEQ ID NO: 36573 - protein, 39 aa, Homo sapiens
VEREQPGRKLRRLDLLVLTHLTSTIQQAAMTPQLSLPLT

SEQ ID NO: 36574 - protein, 71 aa, Homo sapiens
MSLCTLQMRGGAAVRRTHPTPQCRLRGLHPRPAAPTGLQQANRSQKPTRGLFLFHSYPLFLIFFLHFPSFL

SEQ ID NO: 36575 - protein, 135 aa, Homo sapiens
LLPLPGWSPTLVPLLPPCLHNFSLFCTTGSLTPTSSLFLTCLGAPLYGSIFSSMCPPYLSPFFSHLPLFPCLFSLTPCRVLAAAPGTPGVPGVQAREVTAHDRGEAPGPVPGWGLLGGRSAQSSKVSLRAPQGPG

SEQ ID NO: 36576 - protein, 97 aa, Homo sapiens
LSSWMRFLISIICTWRFIQERITGADLNHGAHKWGGCSSGHGKNFLLQLETAFCVAGYHADSTNTNPHLDAVQTPDVPPISVSLGNVSMTERLKDRV

SEQ ID NO: 36577 - protein, 15 aa, Homo sapiens
MEKSLALMCTRILLF

SEQ ID NO: 36578 - protein, 46 aa, Homo sapiens
MSGGEGAALPILLLLLALRGTFHGARPGGGASGIWCLLLPEQEPPV

SEQ ID NO: 36579 - protein, 22 aa, Homo sapiens
LARLVRNCGTRRWARARCVPSS

SEQ ID NO: 36580 - protein, 27 aa, Homo sapiens
MTGSTLTSTSCGFVFVATWSGPRPGLR

SEQ ID NO: 36581 - protein, 191 aa, Homo sapiens
LFFLFVCFPPFAPGSCAASSCKAVCRGRARPSPLAATPPRGRAGPEVARGAGGASPSERRERRQRSRTHSAAGRHQLGRARTRTRRPARRGPARARVGGGGRRGAAASGGHAGALLRVQPQLPGSGALPRRRAELLPRGGRGGRGRLHRHAGPHERVLAPCARRAVPGRHGPRLRALHAAAAAQGHGEAAL

SEQ ID NO: 36582 - protein, 22 aa, Homo sapiens
VLLFLKLLKFVGFSLFLSLLEQ

SEQ ID NO: 36583 - protein, 29 aa, Homo sapiens
LNERGQRMLPMLPLFIVSPGGSHVLEEGW

SEQ ID NO: 36584 - protein, 42 aa, Homo sapiens
LQGGAGTEPVPGACIGLEVGLGLGAGASLPLQLTSVVLPLGG

SEQ ID NO: 36585 - protein, 96 aa, Homo sapiens
MPGDATSPALGGGGRSSVRRGHTKASRIIASTPSPTARRRPLRAGTPPLSDCCRVSLRLRPWRVCHLRTTTTTTHSTLKTPCDPGMHSTKSVWPRI

SEQ ID NO: 36586 - protein, 38 aa, Homo sapiens
LYFLEKSVFFLLTLTASFWPGTTGGTWQIMGFEELSIC

SEQ ID NO: 36587 - protein, 78 aa, Homo sapiens
LLLKSPGGRRRRRGFLAAASAPPPPSPSPRFLSAPRAPATRPQPALSSAPRSRRARPSPRHGGPAGPRAPLHRAAHPA

SEQ ID NO: 36588 - protein, 15 aa, Homo sapiens
LLFLVFLEMLSPSIF

SEQ ID NO: 36589 - protein, 118 aa, Homo sapiens
LYIWALSFYSVYYMSLSLSIVCVCVCVCVCVCVVQECHPQGPVNLSFLLHGCLPAYLSLRILGAVRGCQEGKEPPSLSCCSSWHSGAPSMEPDRVEGLLGFGVCCCQSRNPQSRTWAF

SEQ ID NO: 36590 - protein, 35 aa, Homo sapiens
LLPLKMNFMNLFQVDLSSDVAWWAFLLVLMWFFGF

SEQ ID NO: 36591 - protein, 54 aa, Homo sapiens
VEFRMYTHPERQRGHLRKQRAPSWLPSDRAHGYWVGLLRTLSTAWYACGLGIRI

SEQ ID NO: 36592 - protein, 24 aa, Homo sapiens
MLYSKMKENMKCFFLSLLVECVSI

SEQ ID NO: 36593 - protein, 33 aa, Homo sapiens
LPGIPHAARNPTHSYSVRLPRKGCSAVAALVRQ

SEQ ID NO: 36594 - protein, 65 aa, Homo sapiens
LHIRDITVYRLTTGRMLRFYMALVWSTSTTMHFIGQLKHFKMSFMLTPAFVEPRKFIYDLGSCSK

SEQ ID NO: 36595 - protein, 112 aa, Homo sapiens
LTQESALEGEHQRSFRKPPGPRAPCPHPTHVSLSLGEARGTRPHQPNIKDTIGTAAPAAPTPHRRLHLHGHPLRRTVDHQPPHHPRAELLQRDDAVPTTSLFFFFILLSLCF

SEQ ID NO: 36596 - protein, 62 aa, Homo sapiens
MRRGFHLGLSSGMTSSVHLLVFKDHLLSMLSCCQGACCPSTPHEGTRSTVSWIPPTYKAATH

SEQ ID NO: 36597 - protein, 41 aa, Homo sapiens
LPPGSGLFAPAAAAPPFHLVGLLHWLLVAARGLGGRPAERQ

SEQ ID NO: 36598 - protein, 33 aa, Homo sapiens
LTGPRLLDAASPLLLPAGRAPVAAAKWGTKALC

SEQ ID NO: 36599 - protein, 67 aa, Homo sapiens
MTKVPSCFLLPVLLLGRKRGLMRLHSGAHITRCICRHRAGCLQPGEGQREGVYECECVCMEVGALGV

SEQ ID NO: 36600 - protein, 129 aa, Homo sapiens
LRSIPFMGQRGAVGPPAALGVEGGAAPAPLTLACPSSRYFLDSTSETSLMPKTWISWAEIRSHTSSLSMSHPSLCCRISPTFASRSLIPLRYPSKSTSKNVSTSSTAAALMGGTALCTALQASLAAPRL

SEQ ID NO: 36601 - protein, 43 aa, Homo sapiens
LRAWPDLQTRLGQHFGGGGGVMGGGHIGALLLFLLSWRVGDSG

SEQ ID NO: 36602 - protein, 13 aa, Homo sapiens
MYIFPILFSVYME

SEQ ID NO: 36603 - protein, 27 aa, Homo sapiens
LYIVPKLLQGVIFALVLRNNSAVLKNI

SEQ ID NO: 36604 - protein, 34 aa, Homo sapiens
LLDLNSTESLARLSYLAANCCLICWDLLSLLLIM

SEQ ID NO: 36605 - protein, 48 aa, Homo sapiens
LIHRLSWRKLLCHFRVLSSETAVAAWVALGPCTSLHVARSAGSRSKRH

SEQ ID NO: 36606 - protein, 51 aa, Homo sapiens
LSLPVMATFGCCLHVWGHRAPSPSPEKLSQAFWLSSTGALQTPGPFQSKSN

SEQ ID NO: 36607 - protein, 49 aa, Homo sapiens
LAVLWFLCSPPIRVLLATQRKMLPTASLAQVGWTSTCPQGCVYCIGATV

SEQ ID NO: 36608 - protein, 33 aa, Homo sapiens
LVFGAGLAPSLGSGSSLSTRASPPSLLGAALRG

SEQ ID NO: 36609 - protein, 83 aa, Homo sapiens
LTGQSLPTPLACLTCLIYSPTALQAALVHGLSLHQQVPSAPDKPLLVSPSPAKHPPVPPPVGLASGLWTDSCPIPETPRDRAL

SEQ ID NO: 36610 - protein, 93 aa, Homo sapiens
LTGQSLPTPLACLTCLIYSPTALQAALVHGLSLHQQVPSAPDKPLLVSPSPAKHPPVPPPVGLASGLWTDSCPIPETPRDRALARGPWPGWVG

SEQ ID NO: 36611 - protein, 110 aa, Homo sapiens
LLVLLVLFILQQHSRQPLSTGSPCIRTNNLWSVKIQAPVRFEWAVKSRVLLPQVPSAPDKPLLVSPSPAKHPPVPPPVGLASGLWTDSCPIPETPRDRALARGPWPGWVG

SEQ ID NO: 36612 - protein, 112 aa, Homo sapiens
MPHSRNHACSPGPFAVLWASGGFPAIQAGLPPLRRLVPRVGGGLSRMPPGVRAWWAQFSLPLSLGEEEGLGGLRSWALGLSCPPLLLCEAADPSLPTEGLGLEASSRLPGES

SEQ ID NO: 36613 - protein, 38 aa, Homo sapiens
LLAAALCFSSLCVLWSLILLYRNSFKNYVITPRIFCNV

SEQ ID NO: 36614 - protein, 43 aa, Homo sapiens
LLMYWKCFLTFGSLCSHCPHPRPTTKNPAEAETTKRQSSLLLQ

SEQ ID NO: 36615 - protein, 102 aa, Homo sapiens
LLWGFATGCWLFSPPLSRSLLLLLGCSTPVRIRRGGTSLSAAANSRRVRLRTPGAESRVPPPPRGTHSPRSPGPRVLPPATLPHFSPLFQSHGILRMPERWR

SEQ ID NO: 36616 - protein, 32 aa, Homo sapiens
VTPRRRIPGAGVFSQLLLPVGLGPGLDLRWHP

SEQ ID NO: 36617 - protein, 38 aa, Homo sapiens
VILAYVCSSLLRVLLSSGAARNGGSHLASAAGMDQTAS

SEQ ID NO: 36618 - protein, 31 aa, Homo sapiens
LNMGLVLLSSGAARNGGSHLASAAGMDQTAS

SEQ ID NO: 36619 - protein, 163 aa, Homo sapiens
LPGLGREAGGFSGYKAAEMWSFLPGAESVSMGPVPGVSSLGACWTHDQDSGRAEDRPQAPRITQYTWVLSFLFTEKPQTRSTSPISHQGQPQTTRALSLRQPQHPSAPASGRPRPPHSSGPDLAEAAPVVDQASQAAGRASSGLGLWEQASVSQGFRNAAFEA

SEQ ID NO: 36620 - protein, 125 aa, Homo sapiens
LAAVPRAGPRAGCSILGAAGYWACAAGLWVLGLCRSLALSAELPGTAASDAGPLDAAEPGFFTLSFRREAPVRAEEGAFTTSPWFHSCSEEGVRRNHGSHSLGGSHCGRSGLSHLYDLPEGAHEH

SEQ ID NO: 36621 - protein, 194 aa, Homo sapiens
MARSVWCWSTSASAGPTASQWTTRMGSCTGAMHGQTRLNGSTWRQVRTARWFCPATTWTCFQCLCLRISSTGVTGLMPTALSSAGAKTMPQTPCPCEPASASSLKTSKSSTGTGRKAPTCARWPMAGASSCACTGAVGSGPAPVPTGCWLKTEHRAASMPATCSTQSAPFSRVSTCRMSATSMRPCSPSRTLST

SEQ ID NO: 36622 - protein, 91 aa, Homo sapiens
LAMDGPRAAALRPREPVQPRAGAPTAAAGAAAGSTLPRPSRPQGPHVLGRRRLQHQRLRRWLGESSQWLGDVGLFSAGSAGGMVLGLLCRV

SEQ ID NO: 36623 - protein, 54 aa, Homo sapiens
MRAVNTTNSKCRCRMRPRCRRLPLGLSGARPRSACMCRTPTSPPCSRRTHFGPA

SEQ ID NO: 36624 - protein, 50 aa, Homo sapiens
LLFTPFAHTLRVVVAFFFSWRGGCFLCIFQIFFCWKIKTGQKSMIKMCLH

SEQ ID NO: 36625 - protein, 137 aa, Homo sapiens
MLPTLTAPTLALLLLPKISCLLTSTHPRTQGSRAHFPRAWRLDPGEFLHPLQDPHSSPLWSLDHRWRWPELTCWLWGHSSCWPRMRRGTRSFTCLRLGGCAGRHMLRLRCSRCTGVLTFVSIRARPLSWWRLLPTSP

SEQ ID NO: 36626 - protein, 54 aa, Homo sapiens
LSGIAAYALILQLVSNRGSIDWELLIQKIKRKKPENIINPLRTRHNELYILPLP

SEQ ID NO: 36627 - protein, 48 aa, Homo sapiens
VVGFLSLSLSLLALPTQQRRPPARNGLPGASSSSFPKLNCPVSDSDFS

SEQ ID NO: 36628 - protein, 107 aa, Homo sapiens
LISPTLLVLVATRVRGRPRPPSVCRCSGGGLAGCGRVCACGLGPGPSQKLKRQMSGIATLAPPVAGGLWGSTWSRTEKLLCLCSLGTHWKLYSDIFWDLVWIVQTGA

SEQ ID NO: 36629 - protein, 103 aa, Homo sapiens
MQQKPHRLERNKSSFLCPGAGCGALAEPSLQSPPGPLAVEGGLGLARRAARPEHPGQKTIDVHLQMQHPVPGALRWVQNVDGVFKRISFQVDQEVNVVILFPI

SEQ ID NO: 36630 - protein, 52 aa, Homo sapiens
MAHIPAFLSRLYLPLHPSRPSQKIYKISSGKSLGVLGRERRKIVGWNKNRVE

SEQ ID NO: 36631 - protein, 29 aa, Homo sapiens
VCVLCYLSLYALQNLFTLLFWKRIPEAKP

SEQ ID NO: 36632 - protein, 24 aa, Homo sapiens
MSSVKAARVASAPWWSQHTCLSRR

SEQ ID NO: 36633 - protein, 116 aa, Homo sapiens
MHCPCLLSACCMLGPSMRSAVMGTRKGLCRRHGETQRAAGAEGRAAQAAVLHHTQAREARDRVRLHAPLPGDRAAARAGGTGEGHGEAAQDSEQLHGTAEDQPGAGGQAVPHGPAL

SEQ ID NO: 36634 - protein, 45 aa, Homo sapiens
LSCCRLLSSLQPPSLAYSAQESLEPPPPLPNQVNLTRSRGRCRKA

SEQ ID NO: 36635 - protein, 33 aa, Homo sapiens
LVRLSSCVPVALMSAMTTSSSQKNITPAILTCC

SEQ ID NO: 36636 - protein, 77 aa, Homo sapiens
LRPSRQSGRRKRELKAMKSVPHATSPRDPRRVWNPSPPLSAGGQLRPAGLGLLNTDFKSGPRGPASLREVVAFCGCC

SEQ ID NO: 36637 - protein, 88 aa, Homo sapiens
LSCSAMVDVLAFPLPSAMIVSFLRFSSHASCTACRTALSFIKYPVSDRVDFNWQSYSVLFTWKILCNLKVLALLTLRMTMEHLNGSCL

SEQ ID NO: 36638 - protein, 39 aa, Homo sapiens
LELQAAFWMQSLREVNHNTHWKSALLILHLLVIMHRCHL

SEQ ID NO: 36639 - protein, 81 aa, Homo sapiens
LPLSLPGPRDDASSARTCRPQRTARPRPWPAGSVGASAAAAAAAAALGGRRLRPGPPKERTPHLRRLERPCRAGPGGLWPD

SEQ ID NO: 36640 - protein, 38 aa, Homo sapiens
LENPNFSLFRLLFLAKFKGWLLVHPVALCHAETVCRQA

SEQ ID NO: 36641 - protein, 102 aa, Homo sapiens
LLRPPRSCLSSGPGLGFVLGLGSFCAPRCPVCISAPPAGPPRSPPARFPRCPPSLPPTLSRGSRPSTPFGRGPLAPPGRAPPPPGPAAPDARAPRGCWRPGP

SEQ ID NO: 36642 - protein, 25 aa, Homo sapiens
LQIIICSLFHLPLEGILILQTMLPT

SEQ ID NO: 36643 - protein, 32 aa, Homo sapiens
LPRSCAAPASLRLAGAAETSMAWWQWLAPGWP

SEQ ID NO: 36644 - protein, 33 aa, Homo sapiens
VFCLPSLAVWGLPGPLLAASIDPRCAAICHGRH

SEQ ID NO: 36645 - protein, 168 aa, Homo sapiens
VALIPMTLKHAWPSPEIPAPSPGPDGNRSSWPQPPREDPITEERSMWRPLAEVGGPGSWRGVKGQDGAGAAPKHGENQRPQEWQTLDMLLEMGGQNDQRSGSLHLRGSRVTSFKVWPGTPPIQPYAAQDWLNSSTLHCCSPMTRHFPPATAGSPVTPQAAQMPGRSCW

SEQ ID NO: 36646 - protein, 32 aa, Homo sapiens
MVWNFLSLILMMHHARKFFLIPKLQFQNYLPF

SEQ ID NO: 36647 - protein, 44 aa, Homo sapiens
MSPTTYACCYNLSSVNFLSLILMMHHARKFFLIPKLQFQNYLPF

SEQ ID NO: 36648 - protein, 41 aa, Homo sapiens
LERTYMRFVFKRKTVFSSRLVPSLLISGATLLLVRWKFQQE

SEQ ID NO: 36649 - protein, 119 aa, Homo sapiens
LGGLGAAHLLLSGECVCRAAGGLRLPPHLHGFLQPGLPVHCPYPRRLGLPRWRPGGTQANHGGLCGPASAPGARQCDAHAAAGAAAPAAARHAAPEPGAGFLWLRAALQLGISSLLPAP

SEQ ID NO: 36650 - protein, 15 aa, Homo sapiens
MPMIFTSLICYLNIL

SEQ ID NO: 36651 - protein, 96 aa, Homo sapiens
LAFCRRCGAWVHWAWCLVAALSSFPSTAQGPSAFCGAGLRPCCVPLPWISRELVFLEVPDPCSGPGRLPGPSYGHERLWRVICSSRNRRILHGSVM

SEQ ID NO: 36652 - protein, 43 aa, Homo sapiens
MILSKFQDSWVKLHPLGAVTLSQVSGAASNLLIISQRSKRPSS

SEQ ID NO: 36653 - protein, 45 aa, Homo sapiens
VCSERQRRLLGGARAPLCPSFLLQSLGLPWSHPPPACPLVSLQGP

SEQ ID NO: 36654 - protein, 60 aa, Homo sapiens
LASAVPLRLLGLPADAAFLAPLGVPLPGRPPPASCSSCLGMGPPPGLGRPGWGPRGASAP

SEQ ID NO: 36655 - protein, 16 aa, Homo sapiens
LIKRGLLLMHSIDLLL

SEQ ID NO: 36656 - protein, 40 aa, Homo sapiens
VCVFRSDVPTVPATGRLWCTAAAGSTSAASTVWYSVFSKL

SEQ ID NO: 36657 - protein, 15 aa, Homo sapiens
VNVILKFVMWMLMQP

SEQ ID NO: 36658 - protein, 35 aa, Homo sapiens
MIRKAGSGCRAAGGPGGLIFNLSMPAAPFFPDQGL

SEQ ID NO: 36659 - protein, 232 aa, Homo sapiens
LSFRQHLPSAVCVRKPILSCLPGPRAAAVREPAFVAHGATTQSGARLLSGPGYWHFPGAHGASAPIFPMRPQPRGGSGRKENTGEEREGRAERYHAISADGERRLQPGTAVLTRHVSFLFGGREAEEHVMETDRVEGARDGDKRKEVCFVPIQGSFCFMRLTCARLVAALDIHGLSFSLRFCGSRDTKHEDITGREGQVTPLPRGTPQLCTARVGLSSPRTRGQGVPISCKT

SEQ ID NO: 36660 - protein, 144 aa, Homo sapiens
LPIWVFGFFCVFIFFFFFLTRSVLPVNQGSVSVSVGSGSRAFFPFALILRKAEPLGCGGRGQGHIPIRVGRGSLLAHSGCAGKKRPGLGRNRSPTVSACLASSPFCQLSSLWFLCPQVSGSIHKRKIHFFPQGWGKDSGESARK

SEQ ID NO: 36661 - protein, 79 aa, Homo sapiens
LAGGHPCPTAAFRQQTRHRHTEICQERGVSVIAGQRGWPPEAAQAAATPLQQRRFPCGPSTCWLLREPVLVLLLRVLLL

SEQ ID NO: 36662 - protein, 64 aa, Homo sapiens [sequence omitted]

SEQ ID NO: 36663 - protein, 139 aa, Homo sapiens
LGRHRGRLEALLPGGDTQSRRHRGAGCVRWLAGAALPCSLAPGCGAAAGASPCPGAGRRRAAGRRCLACECTSLTCKSGSAGASRGSASRPAQARAAGSGTRQGRPGAAALPRGASGHPPILSLFSSPLACPRAKPRSA

SEQ ID NO: 36664 - protein, 39 aa, Homo sapiens
LPGQPRPRGWEMGARSRPRAWATRSRYTIIILLVLCVAR

SEQ ID NO: 36665 - protein, 10 aa, Homo sapiens
MCLLIVLLFA

SEQ ID NO: 36666 - protein, 60 aa, Homo sapiens
VDLKRLRVSFKTLLYVAAMHFFQLYFQPCNVHTSISVPRPLQGFLVPERAMCFSPLELFE

SEQ ID NO: 36667 - protein, 41 aa, Homo sapiens
LQGSFSEVEWLFIFLFFMYFRWNVEIFQVLHNQRLYKPYRI

SEQ ID NO: 36668 - protein, 46 aa, Homo sapiens
LCVCVCVCVCVCVCVCVPMSMYRVRGGRVAGGCFIGWRAPCPRAIK

SEQ ID NO: 36669 - protein, 49 aa, Homo sapiens
LAAATPGPLIKKGEGKDKCKKGGLSPPRVAGGRGGSMCSGQLQGAPLQK

SEQ ID NO: 36670 - protein, 50 aa, Homo sapiens
LGGVHSTFLPSHRKLSSAVGCWGRLMFGSLSTLPIPDSPSHSFQSPQGDT

SEQ ID NO: 36671 - protein, 42 aa, Homo sapiens [sequence omitted]

SEQ ID NO: 36672 - protein, 40 aa, Homo sapiens
LFFLPEFSLWSTSFLRLSSVFLFLSPLPPTFFFPSQFLAL

SEQ ID NO: 36673 - protein, 44 aa, Homo sapiens
LPSLSLLSLSPMQPSEVMGVNSPRGYRFTLAHSSPGSWGSLLPQ

SEQ ID NO: 36674 - protein, 45 aa, Homo sapiens
MAQAIICGALSVVCPAGRAGVTSARNPDGVWRGGAAGEPGPDRPR

SEQ ID NO: 36675 - protein, 130 aa, Homo sapiens
MGHRPAGGMGGLGLLGRAPILRGAAGEGPGNPDHAQLARVRLPPGHQLFLAHHRAPGPGTDPPPRAALGDPGGALQLAASRDLLKICCVPSTALALVGTQNSPNPCMHANKNVKITTETSLRRARYRVLV

SEQ ID NO: 36676 - protein, 22 aa, Homo sapiens
MKKSCRWVFFLITKSLFKETVA

SEQ ID NO: 36677 - protein, 42 aa, Homo sapiens
VAFFLWLPVGLRTLADICWLATANIIQDVQQREQHRWQNRLS

SEQ ID NO: 36678 - protein, 43 aa, Homo sapiens
LSLPYLSLVQVLSALCGQRILLQEEVRVHCGAKADIKVCVLCG

SEQ ID NO: 36679 - protein, 126 aa, Homo sapiens
LWGFLLWVSFICAGRSLIDLVPSSSAFSSRLSSASAPSSWWLFHFTVILSTPSSALPLPSQACPFTSSSSECQNISDRFTSEGSWGLPQGTSRSCVCQLLQKWIWKMEERCPSNGIPNLTKHHLES

SEQ ID NO: 36680 - protein, 104 aa, Homo sapiens
MLSILFLPVSSIISISYGQSIVGNWCWLTLHGRIEKSSCESLPKAAPQWSLWLEVHGPPCSCPWRTPRVPSILLRPTLFKNIYSMYAYMELKCHYCNLESALKY

SEQ ID NO: 36681 - protein, 323 aa, Homo sapiens
MPSCRRSAFPTEARGIQLCLGVGATRGALSLKVSVFFPSDNNRWRRRRREQLLRLFVCTVAAVVTLPGARAALPEQVAQLGYAEQRRQQPHREIEEHEDGLLGGPAHEAVDRVRAGRTGAREVRGHAEAVEQRLAAQEGQLGQQAQRHAQQVAAARAAGAQGARRALGLGQSGGALRRRLSAARLLACPVHGVDDEQHRGRREQQDVEEPEAVVGDREGAVVAGLATARLQRVAHELLLLVLEHGAAHRGQHQDAEDQHDHQPEAAHERRLQLHGVQQRAQERPLPHGAGDAGRGVRGWGKSGTPAPSKPIGVGSVGPSLTSG

SEQ ID NO: 36682 - protein, 65 aa, Homo sapiens
LPLGGSWAGRVRVVPLGAGWWDGGGWGAAPSTPAVWFIFFLGPCLSAHLPLTHPRLCPPPGPAHP

SEQ ID NO: 36683 - protein, 84 aa, Homo sapiens
MEKSPRWGAGWRDSSRESVNAHFWPRRKCRTLQRRMLKVTCFGMLLCCSQSPLSLWVSHLIKNKKTCILFLWGIWLPGEYYQMN

SEQ ID NO: 36684 - protein, 68 aa, Homo sapiens
MEKSPRWGAGWRDSSRESVNAHFWPRRKCRTLQRRMLKVTCFGMLLCCSQSPLSLWMKKLKPKSLPHS

SEQ ID NO: 36685 - protein, 60 aa, Homo sapiens
MEKSPRWGAGWRDSSRESVNAHFWPRRKCRTLQRRMLKVTCFGMLLCCSQSPLSLWEWRR

SEQ ID NO: 36686 - protein, 43 aa, Homo sapiens
LGRRCASLHSTGTCGLLLLIHWSGHAGKIWDHLCFLHAVCLHC

SEQ ID NO: 36687 - protein, 68 aa, Homo sapiens
LPSGAFSTCCCLTGFLSEPHALRPLIPGRKGWSPQHPQHPGKWGARLCQRPSRSTRRCSSPITPSCRP

SEQ ID NO: 36688 - protein, 67 aa, Homo sapiens
VPRAFSTCCCLTGFLSEPHALRPLIPGRKGWSPQHPQHPGKWGARLCQRPSRSTRRCSSPITPSCRP

SEQ ID NO: 36689 - protein, 51 aa, Homo sapiens
LFSSGKIALASSAFISGAEGLTGLEIAPEKSIRGVRRLVPHCRARRSRWWL

SEQ ID NO: 36690 - protein, 59 aa, Homo sapiens
LALPPRACSPPSPRLHPPRSRKRQLRLRGWRRLPPPTTSALAALALRPSPAAAPPPRRR

SEQ ID NO: 36691 - protein, 30 aa, Homo sapiens
VPGWVLVCALLLPIPLPPRIKEEPGGVLRK

SEQ ID NO: 36692 - protein, 106 aa, Homo sapiens
LTAAHPFSLQYVVRILPFPTMNPPAEIPVHILSTKNLNLKEWLKEVRRHLQHFYWRSPCLDHQILTVLPRLQCSGAISTHCNLYLLGSSNSPASASQVAGITGITH

SEQ ID NO: 36693 - protein, 67 aa, Homo sapiens
LRRFSPRKCLLRFPCSSVSHTLSISFCNFQAFPSNCMYLVTCFQAGSLSGPLAWGKPPHLLRVLFRV

SEQ ID NO: 36694 - protein, 33 aa, Homo sapiens
MTFSKDLSFCRLASELCLLGATSLRQLRMWMQI

SEQ ID NO: 36695 - protein, 35 aa, Homo sapiens
LRAILLSLSRLWTCAKGPLLSPDDAHTNGFSDGGD

SEQ ID NO: 36696 - protein, 68 aa, Homo sapiens
MPAARAADLAAPAGAALCAAAGTLAPVEPGSRCNSSWMVAQPVRAGQGLCSTWRGPPIPGCRTLCPLT

SEQ ID NO: 36697 - protein, 57 aa, Homo sapiens
LPAASACYGPGKHLGIPFLHRDPSQLKLIHSCGSTMQLTQILSKQSSQVGDPQESLH

SEQ ID NO: 36698 - protein, 38 aa, Homo sapiens
LFWVLFFTALRNYHSQKVHSYCDLFICYLGLKEPAYIY

SEQ ID NO: 36699 - protein, 64 aa, Homo sapiens
VLLPRLLTLALWLGSACRPLACSLRGKSCFLSAPFTHARARWAVPSSPALLLLLVLANAAVGED

SEQ ID NO: 36700 - protein, 55 aa, Homo sapiens
LQKASFLLCSLHPPISHAALGQTSTGLSWVWGQHGAGGGRAALLAWRKVEWLEPR

SEQ ID NO: 36701 - protein, 8 aa, Homo sapiens
IFSLVWGL

SEQ ID NO: 36702 - protein, 29 aa, Homo sapiens
MVPQLGAGHASRSVAPALALFPAAAPGRA

SEQ ID NO: 36703 - protein, 10 aa, Homo sapiens
ILAVLIFWIN

SEQ ID NO: 36704 - protein, 21 aa, Homo sapiens
LCRIHCLSLVFYSPWLLLISR

SEQ ID NO: 36705 - protein, 61 aa, Homo sapiens
MNSQMPLRVSFFCGLCRMAMVMSAMYECGQILQDLTSKKTGGGAGGGGEDVWPMHAECKAA

SEQ ID NO: 36706 - protein, 12 aa, Homo sapiens
MTSLLAALWMRL

SEQ ID NO: 36707 - protein, 37 aa, Homo sapiens
MPSWGPVGPTYKSSPWEPGCLALLPGSVSATWSATDP

SEQ ID NO: 36708 - protein, 12 aa, Homo sapiens
INLLILRIILKL

SEQ ID NO: 36709 - protein, 55 aa, Homo sapiens
LISRTSTLLPALRVLLGQGLPCHATCQCLAVEPLGAAAVPAVQFVLGVSVPFHGP

SEQ ID NO: 36710 - protein, 17 aa, Homo sapiens
RLLHFLIFLMTKMNGNL

SEQ ID NO: 36711 - protein, 54 aa, Homo sapiens
LAASVLTLVTLGRSLTLRALWHPRLKGAVILQPCWSVRVRVRGICAPSTVHGTW

SEQ ID NO: 36712 - protein, 23 aa, Homo sapiens
ITAGLLMLYARRKRARDNLVLDN

SEQ ID NO: 36713 - protein, 48 aa, Homo sapiens
IADLYRPLPVVLPLLQQRHCFLPLFFQPHGEYHRSEVQFSSCHIKSTH

SEQ ID NO: 36714 - protein, 20 aa, Homo sapiens
LKTSLPRVLASLPVYLLVGL

SEQ ID NO: 36715 - protein, 46 aa, Homo sapiens [sequence omitted]

SEQ ID NO: 36716 - protein, 55 aa, Homo sapiens
MKDELARGRIASRSCAALAAAGTPCSALSLGPETSHSPHTPPPQLRFSGGRGEGR

SEQ ID NO: 36717 - protein, 32 aa, Homo sapiens
MQVPTSKCKLPSFTSASVPSPLLNPTGRQEGA

SEQ ID NO: 36718 - protein, 15 aa, Homo sapiens
RGWLVVLGVMCVIGL

SEQ ID NO: 36719 - protein, 21 aa, Homo sapiens
LRLRLRRLRFPMGLACGAWAL

SEQ ID NO: 36720 - protein, 72 aa, Homo sapiens
LKPSGRRRGLTLALGSSGHCSGPRLLLLTSALRLFSIGVEAPPVLSCLWREANLPLDQREEKAETGSNAVDW

SEQ ID NO: 36721 - protein, 21 aa, Homo sapiens
LLKQLSLLFGFLRLLASERHL

SEQ ID NO: 36722 - protein, 41 aa, Homo sapiens
LTALCDTKISNSCLLVLSLKKILQSLLILFLGVTIFEAKLT

SEQ ID NO: 36723 - protein, 43 aa, Homo sapiens
LPRRGKHHRTSANTGLKIVIHLPPPLPFFFLELLRSPVGIPAD

SEQ ID NO: 36724 - protein, 30 aa, Homo sapiens
MRPCSEFISILKIFFLEFGGMGGGGGAYLL

SEQ ID NO: 36725 - protein, 59 aa, Homo sapiens
LADIFLPGRMHGPGSPAPEGGREAAPRVVLLEKGVSIQTPREGSWVYFREELEASHRAQ

SEQ ID NO: 36726 - protein, 76 aa, Homo sapiens
LRLVLPEFYFCLSQLESGRLSFKMEIGARGWRLGEGSIQKRRMSLYPRNSLRWAIGFCSARRRTARVEVWLVAVMR

SEQ ID NO: 36727 - protein, 53 aa, Homo sapiens
MGLRILSAYKTLSGRPAHPGALLWKVTHLILSEVVFCIIKGRKKISRRKSCEL

SEQ ID NO: 36728 - protein, 158 aa, Homo sapiens
MYTASSSAETLRTVRRRSVPSSSMPYLALAHNRVSSLNHAASVDGWGTSHRNVADSFSRTSRSCSRFLKGTAGSARREDWNGHLQPWIPRPDRRGWETADRKGERTQVHGLRRSLGPRAPHPGAHRALRPAQSCRSGPRGWTPCRCRGRGPTACRRGS

SEQ ID NO: 36729 - protein, 41 aa, Homo sapiens
MNDSAFPLRGMWVLRMVGVKLPLLSADSTSSLNAEICKKGK

SEQ ID NO: 36730 - protein, 45 aa, Homo sapiens
MEEITRFWMSCAHSVFATGLQSVLTSISSVTISYQEETCYCRHVL

SEQ ID NO: 36731 - protein, 38 aa, Homo sapiens [sequence omitted]

SEQ ID NO: 36732 - protein, 15 aa, Homo sapiens
MSSTCRCGSSPDAIE

SEQ ID NO: 36733 - protein, 59 aa, Homo sapiens
MLILSWFLAFLSYLSCSLICSMLLLSVVFLGILKCVSHMFNKGKIVLKEKVSLNIRSKT

SEQ ID NO: 36734 - protein, 89 aa, Homo sapiens
MQDSTACGSCSGGLLLTRPSTLPLARSAAPCLGLSALPPLPVTAGHDIGQDAAEGTRHAKKMAHPPRHRRPVRPPGSRRASTGLPGGDS

SEQ ID NO: 36735 - protein, 62 aa, Homo sapiens
LFYFCLLQSLACFAAINEGIVAKRAICRKHLLIHRWTLTTAITGTTRDTVQVLCQIHNLACP

SEQ ID NO: 36736 - protein, 22 aa, Homo sapiens
MFLLSMLALPGAELASLLGEEK

SEQ ID NO: 36737 - protein, 38 aa, Homo sapiens
MMGSQLLMTSDLKIVLSLFLLRAVKGWIISGVATPGLA

SEQ ID NO: 36738 - protein, 48 aa, Homo sapiens
LFQMKILLAAQIIRIGTSCIWKLLQWAFGVTKHTSGVPCGENPVQPAP

SEQ ID NO: 36739 - protein, 31 aa, Homo sapiens
LYFFYFVTFCDFFVQNCICTIEQFPADGMNE

SEQ ID NO: 36740 - protein, 73 aa, Homo sapiens
LLSSRAGFVALVTPRGRRKEPGRFDLCGLDRAGQRGTDPLRSRASSFWGMLIRGCAPCSSFMQALGKAGAAAA

SEQ ID NO: 36741 - protein, 82 aa, Homo sapiens
LRATLWGPAPWFLLLPLPPPDPSGPACSAPTGLQPASHRTFGGPRLERSAGVGAPRPQMQSSYREEARGIGSHILFADKKGS

SEQ ID NO: 36742 - protein, 40 aa, Homo sapiens
LVEEKWATYTKNWGFLVLHSTAICRTLSSLWFSLSFLSSL

SEQ ID NO: 36743 - protein, 44 aa, Homo sapiens
LMKVSIPPIKSVSDNTNIWVISGSVLLCLFSPPSCFVVCLITYC

SEQ ID NO: 36744 - protein, 66 aa, Homo sapiens
VNYHVDFYNRPCLGTDSLLLMGWRGVCVCVCVCVCVCVCVCERERERERFVPYILFQQPYILWSTA

SEQ ID NO: 36745 - protein, 51 aa, Homo sapiens
MLFEAVRLSEIMEEVNVNRKGKKSEDGALRHSIVNWKMRKSQQRRLRRGSQ

SEQ ID NO: 36746 - protein, 16 aa, Homo sapiens
MLNCFAFLKIFLVTFS

SEQ ID NO: 36747 - protein, 155 aa, Homo sapiens
LREPGAGAAGEKGGADSLTARSGLRLSLCDTARMTPARQLRQPRPLSQRSERASSPTATHRNRLPTSSARVSTAIAVAAEAAAASSSAREPMKPHSYRPLMLRRADRDTAADPKERRLGTNRPLCPGHSDLGPSPQTLLWTPRFAALCCSATQEN

SEQ ID NO: 36748 - protein, 35 aa, Homo sapiens
VLSCYGIPLLSFLLSNQVECFTGTWFIQLKITWDL

SEQ ID NO: 36749 - protein, 56 aa, Homo sapiens
LNVFAELVDVFVYKYDCCYITPQINSQIKTQLCCQYLILLYLFFLDICVFSNVTIY

SEQ ID NO: 36750 - protein, 135 aa, Homo sapiens [sequence omitted]

SEQ ID NO: 36751 - protein, 75 aa, Homo sapiens
LGGEKESRSDSPNFPGLGTFFEITFFSPRCTPITAGCAFSALPLLLLIFPSSLPGAAERDVFQRYKPFPPAPQFG

SEQ ID NO: 36752 - protein, 23 aa, Homo sapiens
LNGEGSFVFSWLALTFSCVGTTG

SEQ ID NO: 36753 - protein, 51 aa, Homo sapiens
MRPASLRTSLKATASCRQPRTQMRASLGVCGTASSMVTMATTSGSMSAMGS

SEQ ID NO: 36754 - protein, 80 aa, Homo sapiens
MSLGMWQHQWDKMDTGPPSQAPDTGHGGETSPPWPPWLPRFARGCSSVRLPLCTTVALGPGLPAHWPSPPSPAASYQQFL

SEQ ID NO: 36755 - protein, 71 aa, Homo sapiens
LELSSSGWGWGLLRMLGGLGKEGVQRKGVPCPLDVTLRSWDTCSLCLWVFWLCTFVCPCKYVLGRKQKGLN

SEQ ID NO: 36756 - protein, 39 aa, Homo sapiens
LTRSYLKLLLLLGLESTYLFHLSQLEFWNFPPRGGGGGC

SEQ ID NO: 36757 - protein, 26 aa, Homo sapiens
LFSFLLLLVLKYIHTQIQIDRSKSMK

SEQ ID NO: 36758 - protein, 40 aa, Homo sapiens
LYRLAVRPGVGLQVLSVFVLCPAKAVELLLSSARPTVGAT

SEQ ID NO: 36759 - protein, 27 aa, Homo sapiens
MRRCCDRTTARKHTRSHGIPSKLRRRD

SEQ ID NO: 36760 - protein, 92 aa, Homo sapiens
MVGRVSPKFGHLQIKTSAESVRLSLSKELLREFPSKIASTAVNRLFPAPAFEKSWSPECKGVRMLAGGRMCRRMRKRKNREIWMQRHRENAM

SEQ ID NO: 36761 - protein, 85 aa, Homo sapiens
MGVGCPAWTSTPVTMKSTVSSREVATVDKMKRRHAEYCAQEERSACPKRELLACREKQRCRRRGGNTLAVVRLLPAATALVPLSL

SEQ ID NO: 36762 - protein, 78 aa, Homo sapiens [sequence omitted]

SEQ ID NO: 36763 - protein, 26 aa, Homo sapiens
LAERSSRGPPDLQGPLPRPELSLPRI

SEQ ID NO: 36764 - protein, 102 aa, Homo sapiens
LDTSLKSSRLRPSPARGEVRGVRCQPLAPGGASLLMHRGRAPPSDSSRGGRAPSVSFALEPPARVGFSGIPTVRDYSTSRLITFFSSSSAKASLKKNITNFF

SEQ ID NO: 36765 - protein, 10 aa, Homo sapiens
LFLLGLGSLL

SEQ ID NO: 36766 - protein, 32 aa, Homo sapiens
VIRAFMVPTLWMVSGGDLLSLINELHSCCFPS

SEQ ID NO: 36767 - protein, 34 aa, Homo sapiens
MKIHLPLSWLLMGVGVLLRFPGWKIISPGPSYIS

SEQ ID NO: 36768 - protein, 79 aa, Homo sapiens
MALGLPLRACGLWNMSSRLCSAELLFCKETQSSLNLATEIRDSGALSFLGMDYGPVPHLSGALQMSWRSIGQRTKIHSR

SEQ ID NO: 36769 - protein, 126 aa, Homo sapiens
LPDYSPTLHWCLITTGMPALVIHPHSLGDKSIAGTPALAAHPHCSPGLLNAPRCPTRLLRASTLSFLGFTSFTMGNLPPSIPPSSPLACVLKNLKPLQLTPDLKPKCLIFFCNTAWPQYKLDNDSK

SEQ ID NO: 36770 - protein, 32 aa, Homo sapiens
MESPKERSLTLTKHLGDGAPWLGYRADKSGIF

SEQ ID NO: 36771 - protein, 152 aa, Homo sapiens
LHPNLGRLKSHRPHPKLRAALLAHPPPAGLAAMTAPARRSRSLRPGMWSPKEWWEPQPGRDAAAARARSPYPGHLWKPAHLLHQPFPNTVVPPLPSLLKNRIVWGSGIFWTPGTPIRLPLVPLLQSNEPMGCQALETFPPILTMSPFCQRRN

SEQ ID NO: 36772 - protein, 57 aa, Homo sapiens
LGNCLTFYCSLFPRVTPRLVVSSSALFLLYFIHNSQRCWTRMGRPPVAMSPPRCSWG

SEQ ID NO: 36773 - protein, 35 aa, Homo sapiens
IPFNLLTLLLFEGTYIRAYFAKKEDGCFRSGHRKS

SEQ ID NO: 36774 - protein, 17 aa, Homo sapiens
KPRRRKRRLVGTMGIML

SEQ ID NO: 36775 - protein, 59 aa, Homo sapiens
RNSWPLLPWLLLPATSSLNMSEIRKQPNLSCNRDGHARKQTARACSLVGAELSSRVVAN

SEQ ID NO: 36776 - protein, 38 aa, Homo sapiens
MHLSGWERWGQRLSCVPAALSAQESPAQSTASQHGEQP

SEQ ID NO: 36777 - protein, 37 aa, Homo sapiens
MLSFFICLLIFVHLLLLSFLISDWPPPTGSAEHKYSG

SEQ ID NO: 36778 - protein, 12 aa, Homo sapiens
ITMYFMWRTLFF

SEQ ID NO: 36779 - protein, 18 aa, Homo sapiens
LLLLLLLLVAPLQMYCCP

SEQ ID NO: 36780 - protein, 33 aa, Homo sapiens
ILTLLLISYLHEYFSLFSVSLKIELPTPKYEIG

SEQ ID NO: 36781 - protein, 14 aa, Homo sapiens
VVSSLAFWLCHALL

SEQ ID NO: 36782 - protein, 19 aa, Homo sapiens
MTMVAIIITAMGMMALMTE

SEQ ID NO: 36783 - protein, 11 aa, Homo sapiens
LLLFSSLLLCR

SEQ ID NO: 36784 - protein, 8 aa, Homo sapiens
ISILAVAL

SEQ ID NO: 36785 - protein, 11 aa, Homo sapiens
RVFLFLFFFFF

SEQ ID NO: 36786 - protein, 40 aa, Homo sapiens
LATSLKWNLLVALLPLQLWCYTEKLEVSKQTREKEKHQKV

SEQ ID NO: 36787 - protein, 52 aa, Homo sapiens
VFYSKVLNMGVSFFYSLSLMTQQKRNCRPWDNQHLNKLYNYFFKLSYRVIRL

SEQ ID NO: 36788 - protein, 50 aa, Homo sapiens
LVGSSSWPRQTGGGSGPDCGAMAVVSSFAAAASLAESPASALGAPTASAG

SEQ ID NO: 36789 - protein, 105 aa, Homo sapiens
LLPLLTSVLFGRAPSTHLWIHLGALGTMGWWNGCSEILEEWCPHFADTPATLTALPIVLPTYLLPQSLAGEGRWPGAISLQRRGSCFDYHLHLTGQALTLPFIQV

SEQ ID NO: 36790 - protein, 41 aa, Homo sapiens
LPPASMSPPAAAAAASASRARAPASRSRSRCLGHWPPDPRL

SEQ ID NO: 36791 - protein, 28 aa, Homo sapiens
IGMPLPVLLCLTLPMPLPSATARGGNRT

SEQ ID NO: 36792 - protein, 73 aa, Homo sapiens
TGRSAGAAARRRRAVRWELLVLLLLLLPTLRRPGPRCRPGPGCRLRPRRPRPRVRPSQDAAPGRVSTSWPHLP

SEQ ID NO: 36793 - protein, 50 aa, Homo sapiens
MACCYCCWKVLTLRRRVAGCWLYGSLCLAIFSFLWYTDEQNSSTTYLNFA

SEQ ID NO: 36794 - protein, 66 aa, Homo sapiens
KAGGRGPFPCLFLCPASAASRLSGSGLSVPFAVTSSAPSAWKVLHHGDRQVPSRLASGRNFGAGSP

SEQ ID NO: 36795 - protein, 79 aa, Homo sapiens
ILMIHQEATKFFCSQFRIRFIQLQWMFYILYATLLAKCNVLLYSREMGYKQWLSLNQSFVPRKLKQHSMELIYMLDVAH

SEQ ID NO: 36796 - protein, 25 aa, Homo sapiens
LGLSFLLLCFKMANKSWSSESPVQT

SEQ ID NO: 36797 - protein, 18 aa, Homo sapiens
MFPSWPFLWLTLCSLCIC

SEQ ID NO: 36798 - protein, 27 aa, Homo sapiens
LIKILLESALLVSYLCQISSWETAVTT

SEQ ID NO: 36799 - protein, 31 aa, Homo sapiens
VGIFFFFFVWRNGDTKTHLAAEVRRSFTKDV

SEQ ID NO: 36800 - protein, 55 aa, Homo sapiens
RNPARKDIGGGLALKLLFKTRKRRRKRKKRKMLGNIYLTCSTARTLASCCYSCKY

SEQ ID NO: 36801 - protein, 18 aa, Homo sapiens
IVLFFLLAVHFGGYYKEI

SEQ ID NO: 36802 - protein, 58 aa, Homo sapiens
KMLEDPYAAWRLLFLGTQVSSLYCYNFFSRTAVFFACTNGTSSSAGYFSTAGVWREEG

SEQ ID NO: 36803 - protein, 30 aa, Homo sapiens
IKQFRPLALIVLAGVVCSRLKRWSEGERRK

SEQ ID NO: 36804 - protein, 15 aa, Homo sapiens
LLMFLLWLCLFSVLL

SEQ ID NO: 36805 - protein, 52 aa, Homo sapiens
TKAPIRRLPHCKTTWLSLCTAMSPLTTEIWALRRGNSSASWSRAASGGRRSP

SEQ ID NO: 36806 - protein, 16 aa, Homo sapiens
IFQFILCLFSGQSVTL

SEQ ID NO: 36807 - protein, 23 aa, Homo sapiens
KTPEATFTMVGIWIILLGMSYAS

SEQ ID NO: 36808 - protein, 12 aa, Homo sapiens
RKFSLLYMCLCA

SEQ ID NO: 36809 - protein, 28 aa, Homo sapiens
ISLFSLTPTFLFALLSLSHILETVFNTH

SEQ ID NO: 36810 - protein, 16 aa, Homo sapiens
ILIVTLLFSPCVTLEP

SEQ ID NO: 36811 - protein, 29 aa, Homo sapiens
VKSVPQLLISVFFVSNSFITKKEKKYCSE

SEQ ID NO: 36812 - protein, 5 aa, Homo sapiens
ILRVA

SEQ ID NO: 36813 - protein, 32 aa, Homo sapiens
IRRSKTDISSVGGSFFFFFFSHPSGSGRFVIF

SEQ ID NO: 36814 - protein, 72 aa, Homo sapiens
IQTTNPDFLLLLFMSVPVVSAPPFCPPAEGSRDGRPKASVARPAAVHEHHSPRDCGHLPDVLRSSLGGWQPH

SEQ ID NO: 36815 - protein, 32 aa, Homo sapiens
TMTACKRWAMSVTVGCSGITSCLHLPSIPVSW

SEQ ID NO: 36816 - protein, 66 aa, Homo sapiens
LVFLQKFPPWAVVEVVTVIVAAPAAATATTRDGGGCSRNCNIPEVFPELLGCPNRRGPPGGVRGAD

SEQ ID NO: 36817 - protein, 47 aa, Homo sapiens
LGSGTHSRSPSPGRHNDQDSTELYSHIELTINSAHSTQSVKIVFSCW

SEQ ID NO: 36818 - protein, 98 aa, Homo sapiens
LAPLQRSPEVPAYTRPACKPPVGPHSSSASVPLWLSSGTPAEAHLPLLNSRLESWQDPVAGLGMELSALCVGGLGLCLHPAQGCPSLGSPAWLLLGPE

SEQ ID NO: 36819 - protein, 81 aa, Homo sapiens [sequence omitted]

SEQ ID NO: 36820 - protein, 29 aa, Homo sapiens
MAVVSSFAAAASLAESPASALGAPTASAG

SEQ ID NO: 36821 - protein, 123 aa, Homo sapiens
MLGDLPEDAHRGKGQAGIPTRDSPLLGRPVRPPRHGPPIPKPLVQISALWDLIAGCGPVAPAGRERTGEETATRLGRRNQVPGLGAAKGDGGGSSGRAGSDLGLLSPRPGISDLSLLRPPPAL

SEQ ID NO: 36822 - protein, 41 aa, Homo sapiens
MGSSCDSRRPQPAKRLQCRRLSEPQPAAPSSFLCHPLQVVL

SEQ ID NO: 36823 - protein, 80 aa, Homo sapiens
MTVVGGTCLSLGNRAVHVPAPSGSRSLRRQKRNDDSAYCNYPVDIYLVPVTFRKLFGEYNVNIETIRMVCAFVQNLWIHQ

SEQ ID NO: 36824 - protein, 70 aa, Homo sapiens
MAHCCLNLRGSSHCPHLSLPSRLDYRHVPPHPANFSSATFSNHLSALTSQVLHHYWFTETMHFTRPSIPK

SEQ ID NO: 36825 - protein, 110 aa, Homo sapiens
MSGFREKLLRACWRRHFSQKSPCGAGVRGVPGPTNAGRPPSTRASAHVQLLNCPASELLWKMSLYMKKSASGQSQAQWIAKMWKSPRFKLQENRSMESALSCWGITDAFD

SEQ ID NO: 36826 - protein, 91 aa, Homo sapiens
MQDWQELRCSHLPRRPPFHIQQRRRGQPLRRFFTRLRPGHAQVHVHFSGYQVATYLKWCESYSFGTVVDFQIGKSKGPKRQLTGDHALGFS

SEQ ID NO: 36827 - protein, 41 aa, Homo sapiens
IRFTIYCSGCFLIPVLLGPGSFAPCPAPRRGGWCGNGWARW

SEQ ID NO: 36828 - protein, 41 aa, Homo sapiens
LSFPAGHKAFCCRRGDWRPSLLIPLIFQFILCLFSGQSVTL

SEQ ID NO: 36829 - protein, 19 aa, Homo sapiens
KRLKEYRVFFLLSFIYVEI

SEQ ID NO: 36830 - protein, 10 aa, Homo sapiens
IFFLFLLFGS

SEQ ID NO: 36831 - protein, 38 aa, Homo sapiens
IFIRDKMGKKHHIGGTTRILTFLVVCILGSLLCSSRET

SEQ ID NO: 36832 - protein, 24 aa, Homo sapiens
KIPNLLFCFISPLGVVRRSSPCYP

SEQ ID NO: 36833 - protein, 28 aa, Homo sapiens
IDTPSSLAVVSAFLLTAWLPPPLLLGSW

SEQ ID NO: 36834 - protein, 46 aa, Homo sapiens
VSLLHMITSKLWESLEIFMMIKDTFILTLKPILLFSALNQGRSLWV

SEQ ID NO: 36835 - protein, 36 aa, Homo sapiens
LSPEPPCCRRLLPLLAVSPSVPALCAPPSGPWMAGI

SEQ ID NO: 36836 - protein, 13 aa, Homo sapiens
LFFFIYYRLFAVV

SEQ ID NO: 36837 - protein, 28 aa, Homo sapiens
LFFYSEIFLIFSYTAATWMPSLEQQQPG

SEQ ID NO: 36838 - protein, 22 aa, Homo sapiens
MMVMMMMIMTLMIFNRIKIEFF

SEQ ID NO: 36839 - protein, 30 aa, Homo sapiens
MLGAFVWPSLLLLAGKEEHQTTDPGRHFSP

SEQ ID NO: 36840 - protein, 34 aa, Homo sapiens
MLIPEILAFVWPSLLLLAGKEEHQTTDPGRHFSP

SEQ ID NO: 36841 - protein, 19 aa, Homo sapiens
MRSRNIFRVLFYLLAFFRE

SEQ ID NO: 36842 - protein, 118 aa, Homo sapiens
MSGMKWSDERARRRWREAENLMHILEAKSTRLADGLKAEDFAIEKSLAFQSLQFGNQPTNQSTNQPTNQLLNRSTDSSRRQRLENCLNLVQRLKQSNTVSCTDLNSVKTVPHAVGSQP

SEQ ID NO: 36843 - protein, 44 aa, Homo sapiens
LSYSMGASAGNSKVGFDKLRPAGGAHRVLEVHVCFHEDLSARSR

SEQ ID NO: 36844 - protein, 45 aa, Homo sapiens
LSMAGRVAALAAGGSALSKAPGEAPPLLRAACGAGHGAATEAGSL

SEQ ID NO: 36845 - protein, 100 aa, Homo sapiens
LNVQKCNRNSALISKGLISGGALTVLSCLHCLPSNILGMGSNTGIGGGRTADPNNFRLLKGGGENGREEWKGKRKNICVHLHISCAEQKSPTISKRSLFL

SEQ ID NO: 36846 - protein, 29 aa, Homo sapiens
METAAQVRIRTAVFQSGDSGHNYFCLFLS

SEQ ID NO: 36847 - protein, 46 aa, Homo sapiens
MASSVTTISLLLLASFTSLSCVWYFMFSCQDCVDLQILSLPDEVTC

SEQ ID NO: 36848 - protein, 14 aa, Homo sapiens
LLALFILVTVPEFS

SEQ ID NO: 36849 - protein, 13 aa, Homo sapiens
MLCLGWSLESWSL

SEQ ID NO: 36850 - protein, 103 aa, Homo sapiens
VAAVGSRAQTGAILPEAASRSWGRPGGRLKLFFCLFCSLGLGEDLEVWAPSSPLETAMVSSNHHHLTTLHGGCPLRAASAAALSSPLYLSAPEPQSSFRPRDR

SEQ ID NO: 36851 - protein, 326 aa, Homo sapiens
LLQRPSPGPAPLPEVRRTARPAPGSGVFTGCAASPARRTGVARGRWWISSPHLSSPSKVKLLFSPPTRAWQLISGRWASPRPRGPRPAAISAAHPAAPPCRAAPQPKPPRRDVEPAPQSCIHPPRTSPSKARPGPPRAAAAVSHPCFVKHTLCHFRPHLPVAMGVFYVDTSRDTESLDFELQIVGVGVSAALPGRMEGASASILTFLLKELAKHQEFSLRLLSGPLSLRGEKFFRKVSSFLFIPRDHFTHPFFASRVDGTVERGNPALWLCLSSPTGTRATKATKDPTLSSVQASQLEEARRQRPRGHQEAFEPAERAWEHNAEPL

SEQ ID NO: 36852 - protein, 40 aa, Homo sapiens [sequence omitted]

SEQ ID NO: 36853 - protein, 44 aa, Homo sapiens
VTFIRVILQPALSENCQFFFFFFFFCQKIVSSIVTSMLTSLVLY

SEQ ID NO: 36854 - protein, 31 aa, Homo sapiens
MQFGLMALMYSHCAFLFLSSFSSTPPSTPPH

SEQ ID NO: 36855 - protein, 37 aa, Homo sapiens
MPVVCVLFSLFLTCVHDSFDSASKSKSCVVTGAFIYL

SEQ ID NO: 36856 - protein, 33 aa, Homo sapiens
MESLFLFSILFVRVSRPLFTNSLQLERSFPKIW

SEQ ID NO: 36857 - protein, 24 aa, Homo sapiens
MLSLGIFILLCLSSLIFASSCSWQ

SEQ ID NO: 36858 - protein, 27 aa, Homo sapiens
LVADRTASSIVCLSGLVCTFHFQLLQM

SEQ ID NO: 36859 - protein, 40 aa, Homo sapiens
LRLRFMAALPPLLGSVGSWGARSGPEPELASRAETCAPRL

SEQ ID NO: 36860 - protein, 77 aa, Homo sapiens
LTLLLPRVLSHLAAAAPVQTLTLPPKAQPSPNNPQPCTDVGCESLCLSKNQALLETFKQRLDNYFSRTERKLMHQKR

SEQ ID NO: 36861 - protein, 59 aa, Homo sapiens
LARTKRAISLLPLGQACFTAGPASGASTDRGSEASQAPTRSPNAHALRSAPGGGRRSRR

SEQ ID NO: 36862 - protein, 41 aa, Homo sapiens
MKTFMMIQFHLIVGVQWCDLSSLQPLPPGLKQSSHLSLQSS

SEQ ID NO: 36863 - protein, 39 aa, Homo sapiens
VCVWGGLGLLLSVTSPSPSPLPLPAAAAVAAPWAVGNER

SEQ ID NO: 36864 - protein, 38 aa, Homo sapiens
MYSIWCKQILFSILNYSVFCFSLICRRCTSTSFSLVVA

SEQ ID NO: 36865 - protein, 54 aa, Homo sapiens [sequence omitted]

SEQ ID NO: 36866 - protein, 34 aa, Homo sapiens
LGFSSLHSTAALVIATCLLITEESQVLRRGRNTH

SEQ ID NO: 36867 - protein, 79 aa, Homo sapiens
MTTFEERSKHWNHQHSMLTEGGHQLHQPPNSTEPLENPGAQTGNSRDLIGVYWRLYSSQRRWKPRKDTFWRLALAPGTQ

SEQ ID NO: 36868 - protein, 61 aa, Homo sapiens
LEVILQSKKMETKKGHILEISTGSRNPVNRRLRLKACAFSPEKIHLNSEQLRTLGKKDFTW

SEQ ID NO: 36869 - protein, 107 aa, Homo sapiens
LVFAAVKTLSTVTYFLSQAASHLVPCADSSTVARIQYESRGDRRMVGAAGFSTYPSHQGPDALPPAPSAHPCAQLEGCMARSPLFRWVETLMIPAPPCRAPATEQAL

SEQ ID NO: 36870 - protein, 54 aa, Homo sapiens
LTRHSATVIPAGEGPKHLHLCASRGALWWPLKMLRLYHALEHLPGQGICCMTLS

SEQ ID NO: 36871 - protein, 51 aa, Homo sapiens
MLFFTTNFVLSECLSYASCNAYFLISNVSIKPFFRYKENYFKLSNSEKLKI

SEQ ID NO: 36872 - protein, 35 aa, Homo sapiens
MKPLGIPLCFAWLIPCQFQIFTSGQLQGGYPCPSS

SEQ ID NO: 36873 - protein, 15 aa, Homo sapiens
MRTPEVQIKKSAPKS

SEQ ID NO: 36874 - protein, 31 aa, Homo sapiens
LAKRLRAVLAFAATWLGQLTQVSCLPSSACL

SEQ ID NO: 36875 - protein, 85 aa, Homo sapiens
LFSFQLVFFYISFIGHFPISNSEVSPREQHKANNIKHNKNANKYFIFICKRIHQKEALLITPNVKSFVLIKNLIIISCQQMARKD

SEQ ID NO: 36876 - protein, 11 aa, Homo sapiens
VKWIVFWFIVT

SEQ ID NO: 36877 - protein, 11 aa, Homo sapiens
VASVLFAIFVV

SEQ ID NO: 36878 - protein, 37 aa, Homo sapiens
LKIPKKKKKKKKKKVVTIAFSVSYLFWFAETSPKQEI

SEQ ID NO: 36879 - protein, 35 aa, Homo sapiens
MKPDSANVTTWCYFFFFLLTATNPRNISCVPHCPI

SEQ ID NO: 36880 - protein, 237 aa, Homo sapiens [sequence omitted]

SEQ ID NO: 36881 - protein, 37 aa, Homo sapiens
MVMCLCILSPLCIASKSLRVCTKSYMKAMGKPGCQWF

SEQ ID NO: 36882 - protein, 39 aa, Homo sapiens
KQPLEDQHSRDYGGPSVFSVTGAMLTSVSWTHSDSGAFT

SEQ ID NO: 36883 - protein, 42 aa, Homo sapiens
RRRRSAVGSVSARGCGGAGGSSLSGFSLGGGGGGSVDASSAS

SEQ ID NO: 36884 - protein, 50 aa, Homo sapiens
VAAWEGFWQCRGLSFSPFPSLGLSFSLAALGWSLRARGDCQRCPLSVTGP

SEQ ID NO: 36885 - protein, 32 aa, Homo sapiens
LKGRMFISLWFICPRIFTAMAGTKGKRWSPTS

SEQ ID NO: 36886 - protein, 122 aa, Homo sapiens
KHLPVHSSPTPRLTPLWKLQARWLLPQLVYLQGWGSYSLLRPAALISMVLLAREFLYPAKMSVSEVCSSGLSSPLLEQHKTNLIFYASGDICSANGKSGFNQPLPFLKTFCCTHRILSCTYL

SEQ ID NO: 36887 - protein, 51 aa, Homo sapiens [sequence omitted]

SEQ ID NO: 36888 - protein, 64 aa, Homo sapiens
MFLLANSGDSPARFAKRPTVLCVALGLHFPTAPARPGGCSMRCCACVAGGLAVRLTASGLRLGG

SEQ ID NO: 36889 - protein, 24 aa, Homo sapiens
MDLKWAIIIYLIFLMDYSPGYFPP

SEQ ID NO: 36890 - protein, 18 aa, Homo sapiens
MVILLGWAVDLIRFAFSC

SEQ ID NO: 36891 - protein, 34 aa, Homo sapiens
ILYLGPRLWWLNILMTATPICFRLAGRLKAPLIL

SEQ ID NO: 36892 - protein, 62 aa, Homo sapiens
MEQDAHYCLVLLPLSRLAVGLMPVRRSRLAAKLSWSQAVTLDLGSHWPSICIQKASLCLLAA

SEQ ID NO: 36893 - protein, 33 aa, Homo sapiens
MLCSGNTVDFALLLSWSSVLELVLSLSLCTFPV

SEQ ID NO: 36894 - protein, 85 aa, Homo sapiens
RMIRSFWFYGKTLALLPSLERNSSVVSVALRLWSLGTGWSAVRSVAMLITRTAMFPGLQPLERERAHPGYAASVSLRSPPRGEVP

SEQ ID NO: 36895 - protein, 34 aa, Homo sapiens
RFLFLLPFCLCSPNVPVSPLPHLGPLFGPCGQSC

SEQ ID NO: 36896 - protein, 79 aa, Homo sapiens
RMKRTPCGRMWSVTGTCSAAISTLPSSRPTCVSVRSLMSRMKMKCLMPLCCHPRSTEQAGCWTFYIPRGKGAMWSSWRA

SEQ ID NO: 36897 - protein, 29 aa, Homo sapiens
IYIYIYIPICIFFTDSDVCSEIVNHESST

SEQ ID NO: 36898 - protein, 48 aa, Homo sapiens
KGRGFFFFFKAILEVFSCGRSAPLLLLSPLSPTPSGLILFKIFSPILR

SEQ ID NO: 36899 - protein, 25 aa, Homo sapiens
IVSVGRRVFPFLLGFLLPFFFLFSL

SEQ ID NO: 36900 - protein, 55 aa, Homo sapiens
KTDGHMCQWGSLSPGPKKQGTKFKTLASSQPLKPWPPEFPFLSLSFYFFYFYFYF

SEQ ID NO: 36901 - protein, 52 aa, Homo sapiens
IRTKKSRMHIRSPAHPPDPHTPMMSWTMASSHTAPLLVSLASPPADSESRIG

SEQ ID NO: 36902 - protein, 69 aa, Homo sapiens
MQRLPAAFFRSFAAQGLGESVHINTPTSLSLRGRPFISSSGPGARARVTCAPCLHAARILCCFWRGLHR

SEQ ID NO: 36903 - protein, 72 aa, Homo sapiens
MNRLAAVRWGHSLLLSGCLTVPCPCLTGPSISAGELSSADKPAWHGALPLLLVPDPFCPEENFLSPGDAWPR

SEQ ID NO: 36904 - protein, 161 aa, Homo sapiens
MPVGSLPHPGCLWAAFLTLDACGQPSSPWMPVGCLPHPGCLWAAFLTLDACGQPSSPWMPVTWFPWGLPKLRDPKPPSNLMTRLVSEHTCVVPEPLTNPLCNPAHAFPILKGPAHRPAHVFPLPLLCPYLVGSCPFWALVWHFTHKCVLWVVSGPPPAVRG

SEQ ID NO: 36905 - protein, 47 aa, Homo sapiens
LFPRVTPRLVVSSSALFLLYFIHNSQRCWTRMGRPPVAMSPPRCSWG

SEQ ID NO: 36906 - protein, 45 aa, Homo sapiens
LGPFRTLFAHKLPKKKEPTCWYCWLVSLWSTSLLLLCYLLAPLPM

SEQ ID NO: 36907 - protein, 23 aa, Homo sapiens
VSTPLLSFLATLLQSSTNYPCPG

SEQ ID NO: 36908 - protein, 65 aa, Homo sapiens
KMSFTYIWWTQQGRMSTAFCPIHSSLGSMVMCLCILSPLCIASKSLRVCTKSYMKAMGKPGCQWF

SEQ ID NO: 36909 - protein, 48 aa, Homo sapiens
LLLLLTTTTTTGAASAVPGVSSCSGHTAPGDCSSSNQNLGLTGTLAPK

SEQ ID NO: 36910 - protein, 20 aa, Homo sapiens
VAGGTASALVAPLSPLPQPR

SEQ ID NO: 36911 - protein, 82 aa, Homo sapiens
MLQPFGPSFPLGLFPPLDSLSQNPLSPSQAGDSPLATEGRLSVSWTLCLPQKRSSSSRGLPHTGASYVRASQRTSGRTGCAP

SEQ ID NO: 36912 - protein, 32 aa, Homo sapiens
LSILGTNMLLFPLFLLLSLDLCQKEGYAESLI

SEQ ID NO: 36913 - protein, 71 aa, Homo sapiens
LTRRKVPSPLATSLPALTAHAVILVTEKRAEPLPEGRGQDPAGHLLSTLSSLWERQGQQREDLEPGLMTHL

SEQ ID NO: 36914 - protein, 57 aa, Homo sapiens
MTTGPFPEFSLTELLSQEERLKPAHIPGQILQTVVCSVSPTDFVPGHCMFFKPTEFP

SEQ ID NO: 36915 - protein, 28 aa, Homo sapiens
MCIYIGWQWSNTDCFLTKISQVLGEAGL

SEQ ID NO: 36916 - protein, 56 aa, Homo sapiens
MPATPTFQDSSSLMKVSIPPIKSVSDNTNIWVISGSVLLCLFSPPSCFVVCLITYC

SEQ ID NO: 36917 - protein, 88 aa, Homo sapiens
MPPWPRGLSSGWRSCWWCSSGRSTWSASGPPAAAASTWASGGGCALPGSPFPSSTSSWSWPPWWSSAWAPRGRCLPRRPSGASASCRS

SEQ ID NO: 36918 - protein, 20 aa, Homo sapiens
MRALFRVYMFSTLFLASGNE

SEQ ID NO: 36919 - protein, 28 aa, Homo sapiens
MRGTRESPREPAKSLAAASRAAAAAAAA

SEQ ID NO: 36920 - protein, 71 aa, Homo sapiens
MEPLVVSSLLRAQASRQAHHPPAQEACGSRGALSMAAPLRHLRPPKSAARWMRTMALEKKCRRKASRFQLQ

SEQ ID NO: 36921 - protein, 44 aa, Homo sapiens
MEPLVVSSLLRAQASRQAHHPPAQEACGSRGTCTAPSLRMTWIQ

SEQ ID NO: 36922 - protein, 38 aa, Homo sapiens
MLSLQGLRPSLSVQDLKQIQSQEERFQERENYSYHRGF

SEQ ID NO: 36923 - protein, 19 aa, Homo sapiens
MLSPRVGSPASFTQLLSRF

SEQ ID NO: 36924 - protein, 89 aa, Homo sapiens
MLISVSSSWFMCSGGFGVGGNADGSWGRGGYSSGYPSLESGPGRHGPTCIQKFPGVIVMVVGTGGCIRCSWKEGAGVGISWSLLSPMRL

SEQ ID NO: 36925 - protein, 94 aa, Homo sapiens
MRPGSPLAQRDSGQGRGRSGVASCSRGGWAAAAAAAAAAAAGAAAETMSGQRRGLPPPPPPPRAGSRDGPVARTSSASASASTSGRAAAARRLC

SEQ ID NO: 36926 - protein, 51 aa, Homo sapiens
MQAARRGRAEAWPCHGRPGLTLPLSRRPEAPAPHLGTLGPDSGQLGEKLTA

SEQ ID NO: 36927 - protein, 26 aa, Homo sapiens
MVKKGFPHAASLSPAPLATSQDLGCS

SEQ ID NO: 36928 - protein, 21 aa, Homo sapiens
MLTAVSQPRPFLHMLPGTWTL

SEQ ID NO: 36929 - protein, 76 aa, Homo sapiens
MRKLVPNVSEDQQLLRQRLRGNPTLPEGPTAPPAGHFPPLREATGAGLRHSECVESSITTSWQRTELQPSYMRHRE

SEQ ID NO: 36930 - protein, 46 aa, Homo sapiens
MNRERKLKLSKRQQIDGILLCCLGWSPSLKRSSFLGLPKQWDYRAW

SEQ ID NO: 36931 - protein, 85 aa, Homo sapiens
MREQAAHQDFYGNLLLETAAAAAAAAARGLPAAGAEVLAARAPRPLPTARRDAHSPSTRKEVPSPVTGSCRVQIYTELHNQPKTT

SEQ ID NO: 36932 - protein, 34 aa, Homo sapiens
MQTWFQKFVFFWWVQLGLESPVFSIQSSLFFMAM

SEQ ID NO: 36933 - protein, 45 aa, Homo sapiens
MGFHHVAPAGLELMSSSDSPASASQSAGITSVSHHSCLYTSKGVE

SEQ ID NO: 36934 - protein, 106 aa, Homo sapiens [sequence omitted]

SEQ ID NO: 36935 - protein, 24 aa, Homo sapiens
MFSRLAQRGSPELPAATWKPQKGK

SEQ ID NO: 36936 - protein, 51 aa, Homo sapiens
MRRSSRSFRLQCTGFPSSSAQSISAHLSNSMPSSLLTISRCPGMFAVRCPL

SEQ ID NO: 36937 - protein, 47 aa, Homo sapiens
MVREETTYKRQVHFTDGKSEAQIGEKTCPSAWYEEKDFIMSLSDRRK

SEQ ID NO: 36938 - protein, 45 aa, Homo sapiens
MGNAAWAASASIPRMAWPATLPTTAAGSPRTWLRNSAIYTTRSIT

SEQ ID NO: 36939 - protein, 29 aa, Homo sapiens
MGLFLPAPISLTPGSVRHSPASCGNHLKF

SEQ ID NO: 36940 - protein, 32 aa, Homo sapiens
MTMATMLFLVSLGIVLAVERKASVTSRNSPII

SEQ ID NO: 36941 - protein, 33 aa, Homo sapiens
MGAGWPKFSPEDRSGCFNRSWGCVTTAPSKASG

SEQ ID NO: 36942 - protein, 28 aa, Homo sapiens
MCLWVLICPAIFTSNQEVELPLVFLLGT

SEQ ID NO: 36943 - protein, 84 aa, Homo sapiens
MVLRRAQLRPSLSEGQHPASRNPAFSGSTTAFSFPALSLSSPSSSFSSSSSSCSPPLPVLPSRTPGDRRSSLTPLKRQQQSPYP

SEQ ID NO: 36944 - protein, 52 aa, Homo sapiens
MAPGHKPRSAPVRAVPRPRGAGFGGTASPLSLAKPVSLQSCGCSFPYVCNRL

SEQ ID NO: 36945 - protein, 21 aa, Homo sapiens
MLNIGLFLQLRCIALTNQGLS

SEQ ID NO: 36946 - protein, 37 aa, Homo sapiens
MKNLLSSFFLTFSCEIQKGHIVSGHSKKERKKKKKGI

SEQ ID NO: 36947 - protein, 76 aa, Homo sapiens
MATLYLLIYSFCIYQMESHSVTQDGVQWRDLGSLQAPPPGFMPFSCLSLPSSWDYRRLPPRPANFCIFSRDRVSPH

SEQ ID NO: 36948 - protein, 52 aa, Homo sapiens
MATLYLLIYSFCIYQAMVQDPLEHAQLSYGKNKNTTFALLYTQNQQLFLRFA

SEQ ID NO: 36949 - protein, 34 aa, Homo sapiens
MATLYLLIYSFCIYQSCFHDFPVALSTFTSLYDC

SEQ ID NO: 36950 - protein, 33 aa, Homo sapiens
MYPQQPELPDMSVIAALLIILPTADPFCETPGC

SEQ ID NO: 36951 - protein, 25 aa, Homo sapiens
MKWFPSMATLVQISPTLKSSSSWKA

SEQ ID NO: 36952 - protein, 51 aa, Homo sapiens
MVAGAAAAAAAQPSVRCCSLRGVLQRTSPIYFCSRLGLSMCLLPPARGFDI

SEQ ID NO: 36953 - protein, 122 aa, Homo sapiens
MPVPACWISSSLSLLASHHSVSCSNIFLNFNPDHIRVQAQVYFTQESSILSSTLWNFCLLPQQRFCGREYVQAGWPCWLLQFFSQTYMHPMKTAGKPWLLRYPSLLEQQILSTYQMTPQSPS

SEQ ID NO: 36954 - protein, 84 aa, Homo sapiens
MIRSFWFYGKTLALLPSLERNSSVVSVALRLWSLGTGWSAVRSVAMLITRTAMFPGLQPLERERAHPGYAASVSLRSPPRGEVP

SEQ ID NO: 36955 - protein, 110 aa, Homo sapiens
MVGLSLPTVREVRRGNARGHSAGVDPLPTAGAQPLSVDPTGARPLNPALGVLRAPRGALLGGSAAPRVPRSRGPECASPRLESESGGLLRAGGRAPKSALPPMRWPWGRR

SEQ ID NO: 36956 - protein, 124 aa, Homo sapiens
MEPTRPGWPPGFAEERSRGSPATWNTAGITALTLCPLGKCWCFRVIGRHSMFLLLLLAAAIFVIIIFYVRCCKKKTSAAEGPELVSLQVLDQHPVGTSDHRDATQLGFQPLMSALGSTGSTEGT

SEQ ID NO: 36957 - protein, 36 aa, Homo sapiens
MSRARRKSRIAPGRRRSPAAGGILPLTATLVVLCGC

SEQ ID NO: 36958 - protein, 93 aa, Homo sapiens
MRGRRGRAAPPVLPPLPPQGRAGRVQPGGGLGSPPGRRVLAAPCPARPAASAAALPAHGLGCQDVQLRRRLQDAAQGVPWRREQEVFHPKKCI

SEQ ID NO: 36959 - protein, 115 aa, Homo sapiens
MKLSAAPRVWQSLIFKSPCPLRLLPPAGPGSPRLRAPAPHRRFAPRPRAPPRPPPRLCFRLLLLSLLFCVGPDSAPETSHPAASDCQGSLTPRETQHTAILSGCREKAVRQLQPW

SEQ ID NO: 36960 - protein, 31 aa, Homo sapiens
MYLVTCFQAGSLSGPLAWGKPPHLLRVLFRV

SEQ ID NO: 36961 - protein, 50 aa, Homo sapiens
MLPFYMVLVWSTSIIMHFSGQLKHFRRCFMLIPAFVEPRKFIYDLGLCSK

SEQ ID NO: 36962 - protein, 202 aa, Homo sapiens [sequence omitted]

SEQ ID NO: 36963 - protein, 50 aa, Homo sapiens
MTSSVHLLVFKDHLLSMLSCCQGACCPSTPHEGTRSTVSWIPPTYKAATH

SEQ ID NO: 36964 - protein, 26 aa, Homo sapiens
MFAVWRALSLAVETSVTLGRVYFFDG

SEQ ID NO: 36965 - protein, 110 aa, Homo sapiens
MRGQCLFPGSQGLRNSGRSTHPSVEAVTRATLFASGSRRVIPELAIRTEFQARAQRPSSPALCMDQTSKIPSPRKSGSMCVTAHRRANVLRLPMEVRPVVAMESTRCHFG

SEQ ID NO: 36966 - protein, 74 aa, Homo sapiens
MRNIPRRLAENMQQPLFSSCPSLMRAFEVTSAGHPGMSSMVTKCSGQTVWGKAPVLLSLPSCGCSMVPGSPTLT

SEQ ID NO: 36967 - protein, 55 aa, Homo sapiens
MRHRLVSLSVTSCVTPAAGTRRGSAGAVGTNTGRGGPPPHALRASGEQSPAQGVS

SEQ ID NO: 36968 - protein, 148 aa, Homo sapiens
MPRSAPRAAAAPARAPAAAAVACACCPNSAPDFFMVCGGHVRSLAGKRLFSSPPRPACSGPNDLRSSGVSGGAVRPAARTRRRAQGEVEEEASCGEKGRRTAERMGPVAAARAGLDAAWARRCEVPKVTTIPTRQPRAPARPGAPRRI

SEQ ID NO: 36969 - protein, 22 aa, Homo sapiens
MYRIVNLILDLPALVIVTHASV

SEQ ID NO: 36970 - protein, 59 aa, Homo sapiens
MPAAWPGAAAPWRCSLASASSGCAQGCGVRIQRSGWWSISWILPATTSLSAQPPMALSW

SEQ ID NO: 36971 - protein, 20 aa, Homo sapiens
MVLLLVTFLSMDDLLGTQNS

SEQ ID NO: 36972 - protein, 56 aa, Homo sapiens [sequence omitted]

SEQ ID NO: 36973 - protein, 76 aa, Homo sapiens
MTGPVSVHSLVPGERGGTPTPSWRSLQRCSSGPIRDLGCLCVLWSREFATWSHFVTQAGMHWHEHVSLQPQPPRLK

SEQ ID NO: 36974 - protein, 34 aa, Homo sapiens
MIQKREPGMLCSSLPVGSGEAGGVAGLDGRHENS

SEQ ID NO: 36975 - protein, 205 aa, Homo sapiens [sequence omitted]

SEQ ID NO: 36976 - protein, 68 aa, Homo sapiens
MAGAPPPASLPPCSLISDCCASNQRDSVGVGPSEPECDFEERRKDVKSDWSATFMVLRKEFAFLEHSL

SEQ ID NO: 36977 - protein, 52 aa, Homo sapiens
MYCFTEEMEYKKPSNLWNSLLCFSFFFLAVESCSLNRARLVWNSWAHVVLPP

SEQ ID NO: 36978 - protein, 83 aa, Homo sapiens
MGLGGRFLSRCSRRRVDRLAWPQPGRHVAPVLPGWERQPSWELPGSCRQQDSGLGSQGPPGPGAGNHICPQPQPPAPVILAAP

SEQ ID NO: 36979 - protein, 69 aa, Homo sapiens
MKPRTLATMLKTASGPSALINNPGHGLTDSFHPESEDHGGAILNSAQRRLPGILMSRSHCSQCDKHSSN

SEQ ID NO: 36980 - protein, 159 aa, Homo sapiens
MNLLEYFLALTSFILRCSYWIFPSANNMEVPIQGQIIPGFIWSCLKVKSLEFLMIPFLYGLQFDRWEFSTLKKTQFHHVTQAGLALLGSSNSSLPAAALQVLGLQLQGLTFLGLTKEDAVGCESLLPMLKWQVYDTKDAVQQSSHCAQHQYFFLPPSSC

SEQ ID NO: 36981 - protein, 26 aa, Homo sapiens
MPGDCLPLAVHSHSREDGIIYNPAHG

SEQ ID NO: 36982 - protein, 67 aa, Homo sapiens [sequence omitted]

SEQ ID NO: 36983 - protein, 63 aa, Homo sapiens [sequence omitted]

SEQ ID NO: 36984 - protein, 30 aa, Homo sapiens
MKSIQASLISTLRARSAELIRRAVVPRARG

SEQ ID NO: 36985 - protein, 19 aa, Homo sapiens
MNWILIVTLLFSPCVTLEP

SEQ ID NO: 36986 - protein, 29 aa, Homo sapiens
MTSHWPAQTCLCLSFLSSVSTGSFTRLHI

SEQ ID NO: 36987 - protein, 78 aa, Homo sapiens
MAASRCLRWPSCSSSAMSSCAVATLSGSASCPGLPVWRVTPPSPRDTSESRASASCWRVTTSMRCACLRTCWATARRT

SEQ ID NO: 36988 - protein, 34 aa, Homo sapiens
IGSLLLIFLFYSVMFKLRNALCGSSESHLWFSRH

SEQ ID NO: 36989 - protein, 21 aa, Homo sapiens
ISITLRFLLLMRTLSAYAKKF

SEQ ID NO: 36990 - protein, 28 aa, Homo sapiens
LEMSTIILMTKGATYFSTLTLIISASIC

SEQ ID NO: 36991 - protein, 10 aa, Homo sapiens
LFVLVLDLCL

SEQ ID NO: 36992 - protein, 67 aa, Homo sapiens
VGRAHLFFLSVICFLFMAERTFEMRPSLQVVMRLVDCAVTVEISPVLPLRRWDLTKGNVREILMAQV

SEQ ID NO: 36993 - protein, 39 aa, Homo sapiens
LSPLPTLPPLTLLLTLLEPCLPGGPISSGRPCLWATWSV

SEQ ID NO: 36994 - protein, 11 aa, Homo sapiens
RCRALFLVFII

SEQ ID NO: 36995 - protein, 13 aa, Homo sapiens
ITHLILCVFIIKL

SEQ ID NO: 36996 - protein, 43 aa, Homo sapiens
LGIQLSNFLFLVWLLWCAKLRTLLFCHTATPYRCGRCEICHQL

SEQ ID NO: 36997 - protein, 11 aa, Homo sapiens
IQTLSVILTFF

SEQ ID NO: 36998 - protein, 42 aa, Homo sapiens
MFSFSTSHVMLLLQDTALLVLPCTILPMTRGLASYCILRTSS

SEQ ID NO: 36999 - protein, 29 aa, Homo sapiens
MFGQLAVSLLSCCQECLCGQENRMWISCI

SEQ ID NO: 37000 - protein, 41 aa, Homo sapiens
MATFNTIPMWCIIQKENSWHVTISTTCTLSLSLMSLKSRSW

SEQ ID NO: 37001 - protein, 52 aa, Homo sapiens
LSDQRMHLLLLPVIFLPWVLPQHKHTSATPGFSSEKQFMSETENQTANVKFY

SEQ ID NO: 37002 - protein, 154 aa, Homo sapiens
VISCFLLFFNLGRGEGEEGQVLQAPPPPRLGPAAAARLGLRTRALLAAGAERTAAVVPRAERSSLPRPSPSASRRRRRWRLGRLGEPSEDISTWTPDHVPALSSEAHQASLLWAAGPGPGLWTLGSWQAPSAVGSGPRPHHVEPRRWLPGCRRQ

SEQ ID NO: 37003 - protein, 58 aa, Homo sapiens
LQNCELHLFINDPSQVFCYNTTKWTKTSIYPKEIKMLRHKEELLTPDDQLLSSYGPSR

SEQ ID NO: 37004 - protein, 51 aa, Homo sapiens
LHLHFPRLIRVATLATVVTDVWMFLNISEGVVEKNTHSANHLYELNVSEVY

SEQ ID NO: 37005 - protein, 62 aa, Homo sapiens
LLRCRILCYATALQLTFSCLASVRPEAPRPPCTSLSSGTELCQAPEPPGRARAAVGVEGAFT

SEQ ID NO: 37006 - protein, 141 aa, Homo sapiens [sequence omitted]

SEQ ID NO: 37007 - protein, 44 aa, Homo sapiens
LSLEVIMIHSSSVILIVLNCVSLRIVTDEPYVSLYQCRHDFRYL

SEQ ID NO: 37008 - protein, 82 aa, Homo sapiens
LWSQPAEGLPPQLPQGGLPPEAQAPGVFLPVAGFSPPWACLFCLCLLDTVSSPLLQRALPRLRLRSPPGSFCWLRTRPTTAV

SEQ ID NO: 37009 - protein, 47 aa, Homo sapiens
MPESTPSGRQKSLTSAAMCLALCAKGQVRREQDRTSAALWNSAGRSW

SEQ ID NO: 37010 - protein, 93 aa, Homo sapiens
MCPGVMGVGSTQSIVLVPGFPKPSTMNVQWKAEGAASQKDASTHKDWSSQVSSITCKPEKPETLPLGHFINGDFIVIIPAGGRALLSATGNAL

SEQ ID NO: 37011 - protein, 23 aa, Homo sapiens
MPYSTMQRVFLCLFCTLVNYVPP

SEQ ID NO: 37012 - protein, 150 aa, Homo sapiens
VLLLLSSIVGFFLMQSVTRPGIPMCAQLAHSIIVPRKLLQFIKSSGLGISLNSKRRKEETFPTRCGCDASQGPQGHCPRAHRPPLTATGAWIRSYIVQSFRPLPWSTRTRARISGRAHTHSYTRTQTRGRRQVGNFVRRSQRRSASSCSS

SEQ ID NO: 37013 - protein, 44 aa, Homo sapiens
MAPGGPSMPWVRSACPVCAMSVPGPFLPWAGPQEEPVGVERGLR

SEQ ID NO: 37014 - protein, 57 aa, Homo sapiens
LSTSSPTLIIFLFLFLKKISYGHLSGCEVVSHCVFYLHFLCNELETKVQTRWDIQSL

SEQ ID NO: 37015 - protein, 154 aa, Homo sapiens
LEARVREEAAAEGWGLLRRRGSLARACWGRAREPRPGGSPGLSPAASGMFPARCQSAHRALLRGRAVQPSPAALRRPRPDGRALAPQLWVPWSRRAPAAGPPSASSAPGWRAWTVRAASSPCPGPCRGGGPRERRPAARGTSRPGSESRSSLAG

SEQ ID NO: 37016 - protein, 322 aa, Homo sapiens [sequence omitted]

SEQ ID NO: 37017 - protein, 62 aa, Homo sapiens
MRLRCFSTLHPLQHCLESQAWSQSYGLTLKRPLFIRREKGGRDEKGRQRKKLYDHGFSKIHG

SEQ ID NO: 37018 - protein, 24 aa, Homo sapiens
VSTINSDLEGMDLLTVGAILGFFG

SEQ ID NO: 37019 - protein, 61 aa, Homo sapiens
MNTPNIVSLRAHQPEVGIIPSVLLMRPLRIKGVFHHIHSPLHGENQGFTLCLQGAPPSSSV

SEQ ID NO: 37020 - protein, 32 aa, Homo sapiens
LRDLKLFFFVFLWVQFEREVFDPFFSEWIICS

SEQ ID NO: 37021 - protein, 28 aa, Homo sapiens
MVLPSLFWHRRKDSTSLGEKKKENLGLH

SEQ ID NO: 37022 - protein, 97 aa, Homo sapiens
LMLLSPLLVRLNWPLVATPRPDLAATAPSDSSGSRGHGGASAASRSGAGKGAGEAEAEALESLPRRPAPAQKSARAVHTVGTSTPGTARLRAGAERG

SEQ ID NO: 37023 - protein, 50 aa, Homo sapiens
LYHLDVILNIYILARLLKRTHFISKCKLFARLLANGSFNCELIVYISVYL

SEQ ID NO: 37024 - protein, 58 aa, Homo sapiens
MVCISVAMTTQQQLAWASYQSTNVLLTRCLSDFARQFSLLDSHKRFRRLLTAFRGETG

SEQ ID NO: 37025 - protein, 15 aa, Homo sapiens
LFSRELRPLVLVIFV

SEQ ID NO: 37026 - protein, 28 aa, Homo sapiens
LVKPLPTLTFIIVAPSLPSSVPQISNKR

SEQ ID NO: 37027 - protein, 58 aa, Homo sapiens
VEILGLFGHPENRSQIPSPQLQTSRLIGGEHSFSLLFGMLCCLVVTVPMGELYRKIVM

SEQ ID NO: 37028 - protein, 17 aa, Homo sapiens
MFSLFIGLLSLLSHPPH

SEQ ID NO: 37029 - protein, 21 aa, Homo sapiens
MSLFPYRSRGQKSAISFGGPK

SEQ ID NO: 37030 - protein, 82 aa, Homo sapiens
LGSTGSELLRGGSCGRGKGACARRQSGLFPRQLVSPSPSPPSPRLLRSSFPCLGSYTQALFRAKVSVITSVFCLASILPLNL

SEQ ID NO: 37031 - protein, 41 aa, Homo sapiens
MCAATIGPLPQAACEPLSLSALAQAAPIFVSLPRLIHPGFI

SEQ ID NO: 37032 - protein, 52 aa, Homo sapiens
VMQACQGPQTQKMLPGSPMYSRHTAGHLSQQVASHGPHHHDFCPRYCVQKCD

SEQ ID NO: 37033 - protein, 15 aa, Homo sapiens
LVLKTVAAWRAWISK

SEQ ID NO: 37034 - protein, 56 aa, Homo sapiens
LVLPSHTSLPGVSLRQPGLHPGSPHPCHISLFSLTPTFLFALLSLSHILETVFNTH

SEQ ID NO: 37035 - protein, 147 aa, Homo sapiens
VGVSSPLSLLPSLARTLAVSSLCRDCQSVRLQRGGDGRLCHGFMRAGTGRRTCRRRGEETWSRPLALWGRVGQSVGEAGGGDRTGWGWTPGFWERAGSPDARVPKVSGVAISPDPPRGRSAGQRGGGWGEAWPERCWKRSRDLWGPR

SEQ ID NO: 37036 - protein, 72 aa, Homo sapiens [sequence omitted]

SEQ ID NO: 37037 - protein, 162 aa, Homo sapiens
MPRYVPLLLLLLLLRCSERGGGVNFGEKDAKVPGTWRDGVRVPGEGASWDSDRASPERRYGIVGLSQSISTKHPETSPKDSRIRENDVTADGRTTEDHITADPGTTEDSVTADPGTTEDNVTVDPGTTEGSVTADPATTKDYVSADPGTTKDSVTADPGTTH

SEQ ID NO: 37038 - protein, 52 aa, Homo sapiens
MQSTWLLICQAHSDPAAGREGANPGLKTQGDQNQGDETYQGWAAVGVLPERS

SEQ ID NO: 37039 - protein, 69 aa, Homo sapiens
VSPRFLVLKSSPAHRDSDSPQTPRLRVMESRTLLLLFSGAVALIQTWADYNYNQGRNDLIFTLQLWKRQ

SEQ ID NO: 37040 - protein, 26 aa, Homo sapiens
LRVMESRTLLLLFSGAVALIQTWAGP

SEQ ID NO: 37041 - protein, 39 aa, Homo sapiens
LAIKGVLCVPGMVLLWCPWCDPSPAGNSLREVGPLHQCC

SEQ ID NO: 37042 - protein, 136 aa, Homo sapiens
LVSLFLLFLFLFLFLFLRQSLTLSPRLQFTGVISAHCNLCLPGSSTSRTSDSRIAGITDRHHHTQLIFVFFVETGFRQVDQPSFKLLTSGDLPALASQSAGITRMSHRAWPILLYCNIFYYISHHACPIFLCFNIF

SEQ ID NO: 37043 - protein, 38 aa, Homo sapiens
MSEVATLLFSQTALASLESVHPAGHKLWMRNLRQVTSP

SEQ ID NO: 37044 - protein, 23 aa, Homo sapiens
LFFLLLLLFLLLLVVVVVVVLNF

SEQ ID NO: 37045 - protein, 123 aa, Homo sapiens
LGLLSLSGSIFSAAGGRGLLWGAQPVSQVSLQCRGEPPGEPGAGGRRAGVGAEGAAAPASLGGEVTRRGEGRSREGASGPPPSYGRTATGAAPSRRGPGGPGIGEWGAWGPWRASRWRRPRWG

SEQ ID NO: 37046 - protein, 31 aa, Homo sapiens
LWAWPSLISALALLYRSRRRYSWRRGKERWK

SEQ ID NO: 37047 - protein, 63 aa, Homo sapiens
MMAQKSKFRVLFMSDPHGTAMPLTSAILESSRASLAAKQEDKCFTDIRNLKWKHFLEHTKQPP

SEQ ID NO: 37048 - protein, 86 aa, Homo sapiens
LLMPAQNSQLPVSACPPEIKVLQWLSRSHQVISFHPHPKALAVTLLPALTQSLCLCMASCVYSGPKGFLFLFFPQTAQEKHMKNIT

SEQ ID NO: 37049 - protein, 66 aa, Homo sapiens
MNLNPRLRLQVISFHPHPKALAVTLLPALTQSLCLCMASCVYSGPKGFLFLFFPQTAQEKHMKNIT

SEQ ID NO: 37050 - protein, 23 aa, Homo sapiens
VRALTAILWKPPSSLAQASVVAP

SEQ ID NO: 37051 - protein, 39 aa, Homo sapiens
MAARSSSGVAAAEGAAALAAAETAAVTVAAAARDLGLGE

SEQ ID NO: 37052 - protein, 21 aa, Homo sapiens
VLYSVLGMHVILTQWLLLTNR

SEQ ID NO: 37053 - protein, 53 aa, Homo sapiens
VEGGVRACACVLVCVHVCVCLCGRVRQYEQTMITVTLQEVVDAPGQPPPCSSF

SEQ ID NO: 37054 - protein, 11 aa, Homo sapiens
LCVLIIICVLI

SEQ ID NO: 37055 - protein, 59 aa, Homo sapiens
LLLLFALYPMRLGDRSPGFEPCLPPLPNVGTQARPFYLLGLSFHVCTTRGLTRWPQVFL

SEQ ID NO: 37056 - protein, 28 aa, Homo sapiens
LMPNWRPFSCLLPPLILAFPGVLPSPEL

SEQ ID NO: 37057 - protein, 23 aa, Homo sapiens
LARVEDQGTEQKSPWWPECQVSS

SEQ ID NO: 37058 - protein, 14 aa, Homo sapiens
LFSLCFVSVHLLIR

SEQ ID NO: 37059 - protein, 54 aa, Homo sapiens
MLPGLRAVAPGAEGGAGAAEAGKPRTGLLAGHSALHGRSVNGDYSSIYRELAVG

SEQ ID NO: 37060 - protein, 41 aa, Homo sapiens
VSPSTSASAPAATRAPSAAAALLLLKAAAAPWAKRFSNGTF

SEQ ID NO: 37061 - protein, 40 aa, Homo sapiens
LVTFPCHWSSLNTVKPSSSVGCFFFFFFFLGVSQALKATV

SEQ ID NO: 37062 - protein, 37 aa, Homo sapiens
MSPTSLLLLARLYFTWDMLLCWDSCMSTGLSSTCSRP

SEQ ID NO: 37063 - protein, 51 aa, Homo sapiens
IEVQFMCLWVWMAQSVSGLRKADLAPTLTLTDPGIYSRNWKPSATGAWRSS

SEQ ID NO: 37064 - protein, 78 aa, Homo sapiens
ILLWLLVLPALMVGITYACMPLTPAGPTPIMILCPKLIYTSGSSSLLKTNAQMLFTDIYILVSLSCPTLLLFPIPNSS

SEQ ID NO: 37065 - protein, 32 aa, Homo sapiens
LAQCPSPLLAFCCSSTFLCIEGLTLGWEDDKT

SEQ ID NO: 37066 - protein, 34 aa, Homo sapiens
MIRTPIFVMNLTISYNFIVYFVFNAQLLHTLNLL

SEQ ID NO: 37067 - protein, 17 aa, Homo sapiens
LKEYRVFFLLSFIYVEI

SEQ ID NO: 37068 - protein, 63 aa, Homo sapiens
MCSSGVPSPPASHCPCLPKTSSLSLLCPPPPPSAFALLSSFSPEVRAASSPLVLFLPSLCSLL

SEQ ID NO: 37069 - protein, 71 aa, Homo sapiens
LTSRTQKLITTCLSRWLQKEMKKVFLLLLLTCQDCGRRMTSRGQNACCSRRRGWAAGSLSQPQMLSEGTPS

SEQ ID NO: 37070 - protein, 37 aa, Homo sapiens
LPEFSLWSTSFLRLSSVFLFLSPLPPTFFFPSQFLAL

SEQ ID NO: 37071 - protein, 35 aa, Homo sapiens
KSLISSLFLLQDPEALSLSPWSSAGPWPCWGAPWA

SEQ ID NO: 37072 - protein, 74 aa, Homo sapiens
MTQALVSTAWTSMWCWVGQVSASQTRSAGQAALGPNTESAKRRPCAGSSRSMMGSSFLANKFPFLSKRAIKSFQ

SEQ ID NO: 37073 - protein, 63 aa, Homo sapiens
MALRCGTHWLPTKAPIRRLPHCKTTWLSLCTAMSPLTTEIWALRRGNSSASWSRAASGGRRSP

SEQ ID NO: 37074 - protein, 55 aa, Homo sapiens
RSSLIEVQFMCLWVWMAQSVSGLRKADLAPTLTLTDPGIYSRNWKPSATGAWRSS

SEQ ID NO: 37075 - protein, 14 aa, Homo sapiens
LFLFGHLGTGLSLF

SEQ ID NO: 37076 - protein, 84 aa, Homo sapiens
LNARPALDLTDTRLDRLLHIRPRNGPLEKGFFKPAALSSVLASGIAFPGNLASDIAHHPALFTVPGSSWRNDISENADSYVHVI

SEQ ID NO: 37077 - protein, 31 aa, Homo sapiens
ISLISGMFFCLMNAILNAVLERGVGVRVYSI

SEQ ID NO: 37078 - protein, 44 aa, Homo sapiens
VAHHRRGGRRSSLIVPGAVTTVGPSAQSAQPLSVLPNPHNRPRL

SEQ ID NO: 37079 - protein, 22 aa, Homo sapiens
IVLILLVVLLTGELNMYLQESG

SEQ ID NO: 37080 - protein, 13 aa, Homo sapiens
KRGKPEKDSVPDG

SEQ ID NO: 37081 - protein, 103 aa, Homo sapiens
MRRKRHPWKMTRIMSRHPPMTRKLCRTPSCLPSLSPTPTPCTSTGPPLGKPPSSLLCPPRDRWPPSRPHQPAGITRHCPHPRPTTKNPAEAETTKRQSSLLLQ

SEQ ID NO: 37082 - protein, 95 aa, Homo sapiens
RLGGWTILLTLTMGQGEPGGPQGDPWVPHELLLPSLCDSSHASSWGSGSITCAWRGGDSSSHPLVSGHILSNSPVAAVMCSSMGTHLSPFKGTLL

SEQ ID NO: 37083 - protein, 29 aa, Homo sapiens
KVKTLKDRHFWQSSVFCAWTLWAHPGHGG

SEQ ID NO: 37084 - protein, 40 aa, Homo sapiens
VVQPVKTMVPPLLCLSPLSPSRASVQIDHHQNLCGFLTFE

SEQ ID NO: 37085 - protein, 30 aa, Homo sapiens
ISCFLLLSFLILSKFSDSRKRNHSPLPPTT

SEQ ID NO: 37086 - protein, 35 aa, Homo sapiens
IEVEVGEYVVAVRAAFCKMLPGGACDSRPSSLQRK

SEQ ID NO: 37087 - protein, 52 aa, Homo sapiens
IFLLLLLLLLPPPLPLGSFAPTPSRRPAPSPTQDVRGFSKAAGKLQSSAPAS

SEQ ID NO: 37088 - protein, 20 aa, Homo sapiens
MNASRHPSFPGVKVFRCCIF

SEQ ID NO: 37089 - protein, 28 aa, Homo sapiens
LSFSLSLSLCPFLLDRSTVIHRNKHTRT

SEQ ID NO: 37090 - protein, 32 aa, Homo sapiens
IVCSCLGFMPLNFTFYYTAIAGLFMRLTWPLH

SEQ ID NO: 37091 - protein, 55 aa, Homo sapiens
KNIFLKKPASPRKATAVFFFFASFSYFRSRGFSCFSSLFFLFANKTKNSIEERAK

SEQ ID NO: 37092 - protein, 7 aa, Homo sapiens
MQFQGRQ

SEQ ID NO: 37093 - protein, 7 aa, Homo sapiens
ISFFFFF

SEQ ID NO: 37094 - protein, 34 aa, Homo sapiens
IHFLLPISLKGLLLVGLLCTVLQVSSAKGASRGK

SEQ ID NO: 37095 - protein, 52 aa, Homo sapiens
RGLKMGHFLSSPSCSVSALGPAISCCPWASASCCWSSSVWLDSKIPNFRGTW

SEQ ID NO: 37096 - protein, 83 aa, Homo sapiens
RGEDPGNSPFHPNPDRQPSRALCSTPRMHRLWIGPAFFLMTSLSVSGAVIPRNGGPGGVSSGPCLLQLLCGQAGSSTIRKIPS

SEQ ID NO: 37097 - protein, 68 aa, Homo sapiens
IYVSTREQTLVVCVCVFLCWFFKEMGRRKKNSPPLSSISLPPSVLSTGPPSLFCSVLFCFATSPHSCL

SEQ ID NO: 37098 - protein, 50 aa, Homo sapiens
TPATPAALRTVLAVAAAAPVSRWARTQPLGAVAFPASQRQKRGSGTQKVA

SEQ ID NO: 37099 - protein, 42 aa, Homo sapiens
MRPPSAPPRRGCIPWQGLLLTGSWAKGTCLVSEETWDFGLYW

SEQ ID NO: 37100 - protein, 94 aa, Homo sapiens
MRAPRPPAPAPGAPGFGSILPAPVPAAARSRGQRPSGGWKRRGENTPSAVTTLTPLTVMRHLHPHQDAPNCPAAPSRAGPDRTKRSPPRFSGQT

SEQ ID NO: 37101 - protein, 29 aa, Homo sapiens
RRWLFGGSEERLLLLLLLLVAPLQMYCCP

SEQ ID NO: 37102 - protein, 17 aa, Homo sapiens
IENMSFLLIKVFIIKFK

SEQ ID NO: 37103 - protein, 24 aa, Homo sapiens
LLPLLLLLRLLAEAGGSSGGGGGG

SEQ ID NO: 37104 - protein, 89 aa, Homo sapiens
MARPPACSCAWTPRSRFGCSSACTGPSRRSASSAPLSWPSGVSHHSPAPLPPRQPRPVPWAAACLTPCSARAALALWVALLVGQPPIRQ

SEQ ID NO: 37105 - protein, 37 aa, Homo sapiens
IRWICCSSYTMSVCWLLSASGTASEWVMQCWPSMAWT

SEQ ID NO: 37106 - protein, 45 aa, Homo sapiens
MRPPGLLSVSPTSCAQFSGAAGLTSQVFPEPVPSSWAALPPRAPT

SEQ ID NO: 37107 - protein, 15 aa, Homo sapiens
MKNQRNITPGAQLFP

SEQ ID NO: 37108 - protein, 12 aa, Homo sapiens
IFLIFSYIFGFV

SEQ ID NO: 37109 - protein, 20 aa, Homo sapiens
VMMMMIMTLMIFNRIKIEFF

SEQ ID NO: 37110 - protein, 15 aa, Homo sapiens
LRRARCRALFLVFII

SEQ ID NO: 37111 - protein, 10 aa, Homo sapiens
LWLCLFSVLL

SEQ ID NO: 37112 - protein, 18 aa, Homo sapiens
MPKKLRSGLLGCLELVGL

SEQ ID NO: 37113 - protein, 12 aa, Homo sapiens
MAPRGFDACVPF

SEQ ID NO: 37114 - protein, 21 aa, Homo sapiens
MSLFIARLYMMLCKTWIRRLM

SEQ ID NO: 37115 - protein, 38 aa, Homo sapiens
MKSKRHVEAIITIHIPLIPAAAPAGSGAEHDNSDAQWE

SEQ ID NO: 37116 - protein, 32 aa, Homo sapiens [sequence omitted]

SEQ ID NO: 37117 - protein, 27 aa, Homo sapiens
MSSSLWTTTAVSTWTASLLRSRPSTRI

SEQ ID NO: 37118 - protein, 34 aa, Homo sapiens
RASATCMMWIGEMVCPPSHGMSLLCSGIFPSLGF

SEQ ID NO: 37119 - protein, 11 aa, Homo sapiens
KATICLLPVLL

SEQ ID NO: 37120 - protein, 76 aa, Homo sapiens
MRTPGPPRRGSRRSLLPRPAPCPPTRSPWPLAASGSPALTTTSTSASWARRAAARSTCWTSPSTTTSSVARWIHTT

SEQ ID NO: 37121 - protein, 34 aa, Homo sapiens
MLYLSFLEMSTIILMTKGATYFSTLTLIISASIC

SEQ ID NO: 37122 - protein, 36 aa, Homo sapiens
MHGSDFPPRLCLHSMSLWGSWGSRPPSPAHSREVAS

SEQ ID NO: 37123 - protein, 30 aa, Homo sapiens
MLSHGKGRHRVAVVSGHLFSEGSAWSTIST

SEQ ID NO: 37124 - protein, 9 aa, Homo sapiens
ISLFSALLA

SEQ ID NO: 37125 - protein, 19 aa, Homo sapiens
IGLVLLVFIHCGSFSLPPP

SEQ ID NO: 37126 - protein, 14 aa, Homo sapiens
LPISLVIYFYICFL

SEQ ID NO: 37127 - protein, 20 aa, Homo sapiens
RHHFLQLRPNILMSLQLLIL

SEQ ID NO: 37128 - protein, 37 aa, Homo sapiens
MGTQMIHEFALVSLAQVVCANHVCLHSSVLPCVLNKK

SEQ ID NO: 37129 - protein, 15 aa, Homo sapiens
MKIKSLFICFSFSLV

SEQ ID NO: 37130 - protein, 43 aa, Homo sapiens
LGMFRLSLFFPLLQTMGTLGSLGVTMLHLLFICLGKSCSSHTL

SEQ ID NO: 37131 - protein, 4 aa, Homo sapiens
MLAS

SEQ ID NO: 37132 - protein, 12 aa, Homo sapiens
MKNGESSCRMPM

SEQ ID NO: 37133 - protein, 32 aa, Homo sapiens
MMEQLKGDCSFWLICLFFSFSSVLFALMRIET

SEQ ID NO: 37134 - protein, 31 aa, Homo sapiens
VPLPLLPPPLLLLLAPSLHQPEALCFPSWIC

SEQ ID NO: 37135 - protein, 32 aa, Homo sapiens
KQSKPGHTILPQAQLLSCLPTPWGAISAPNSA

SEQ ID NO: 37136 - protein, 16 aa, Homo sapiens
LFPRLCPLALPSLLVL

SEQ ID NO: 37137 - protein, 18 aa, Homo sapiens
LSCWLIRFMCMKSMLIGL

SEQ ID NO: 37138 - protein, 71 aa, Homo sapiens
VDVAFAPTGASESSSPQDELQPPRESSARHQVTRPQPPGPQLRPASPRSGSCTLTLDSAAHGKNRIAPACN

SEQ ID NO: 37139 - protein, 20 aa, Homo sapiens
MKAGLPGACLNAGGRRAAGR

SEQ ID NO: 37140 - protein, 17 aa, Homo sapiens
VPPVSWANRCLSLLKFL

SEQ ID NO: 37141 - protein, 43 aa, Homo sapiens
LAKSGRSHIYAYGIPIMSRLCLFLKMSIHMELPAWLLTQMDSV

SEQ ID NO: 37142 - protein, 49 aa, Homo sapiens
VGTGRVAHHRRGGRRSSLIVPGAVTTVGPSAQSAQPLSVLPNPHNRPRL

SEQ ID NO: 37143 - protein, 81 aa, Homo sapiens
LALLTSPNDPCCRKMSRGTIPAMKRECQYNSHKGSSCGPQTKNHCITSAGCIGEKGAGTEKPEINHLSFLEKRMLRLSRFG

SEQ ID NO: 37144 - protein, 81 aa, Homo sapiens
LALLTSPNDPCCRKMSRGTIPAMKRECQYNSHKGSSCGPQTKNHCITSADCIGEKGAGTEKPEINHLSFLEKRMLRLSRFG

SEQ ID NO: 37145 - protein, 23 aa, Homo sapiens
VWTLHPLLLPLLLLPVAGGSPWG

SEQ ID NO: 37146 - protein, 17 aa, Homo sapiens
LLTLLIFWPLLGFLSPF

SEQ ID NO: 37147 - protein, 26 aa, Homo sapiens
MWCARFPCIVLLTAAPLPLSMTPKQI

SEQ ID NO: 37148 - protein, 10 aa, Homo sapiens
LDAWSMEGAK

SEQ ID NO: 37149 - protein, 166 aa, Homo sapiens
VRDWAYATTGARCLSLSVCGSVLVVLPSSFGICSALVCPRPPQAPMIKSSSLTRACPPHPRQQGGEWGNKITTKSLGVSHSPSPGTLSETLQSPRNSLREAGRRPAIWTKLRYADADRAALRGEDPGGASSAGSSSQKTDDPERVAGTDCQAFGGRRGQSFAGSES

SEQ ID NO: 37150 - protein, 77 aa, Homo sapiens
LQDLVWSGRRRDMSSLWALILVGIFIHQVHKCNFKPSATFSKLFLHLLQSYSDGKNFLCFSSLIYYFFKLQEQCILL

SEQ ID NO: 37151 - protein, 24 aa, Homo sapiens
MQEMVLLVAATGLRSPLVRDGSDL

SEQ ID NO: 37152 - protein, 47 aa, Homo sapiens
LWRLCGAAALAGVGSWCEVRGAVVAPRRGQVSVGRRRVPEVTGSWFF

SEQ ID NO: 37153 - protein, 206 aa, Homo sapiens
MRFVGSTVPLSAAGCADGPGSPASRPLPLPSLPFSLFLSCLSAHPPQPHRRGVASLVALLSCPLCVPLSSLGLQKGRGGGWGASGEEGKSVGYELAGDARLRARRELRANPGPRSVPPRCLGVARAGVASPSAQRRRGGACAVQDPRGPRGSQGAAGPVSLCLQSLGPVRSAPRAPGEDNRCLLPHPGSSGGSPHARWRHCAYRQR

SEQ ID NO: 37154 - protein, 41 aa, Homo sapiens
LIPSKREQSGTHKYGMKTFGEEAFTERRFLGWRKTMIYSSC

SEQ ID NO: 37155 - protein, 46 aa, Homo sapiens
LHVSFCLALLALPKGNFALPGCFFSAVVEYMEVGDAEFSGSSVADF

SEQ ID NO: 37156 - protein, 12 aa, Homo sapiens
LKTLLIWLTWQG

SEQ ID NO: 37157 - protein, 63 aa, Homo sapiens
VALMPLFRVLFSCTCALLQDFRMQPCPPTPTSQGRPVLLGRQTSQEYILHNYTNRPLFKAFGL

SEQ ID NO: 37158 - protein, 164 aa, Homo sapiens
MWGCDCYSTFRRRVSALLLRLRLALSPAWPRGMPPGRSADVTAMLCTSSSPSPLHFLCGAHLLLRQGACAAGRPDSSQPAPPPRLRPPLPPRRVCTTAEARRANAGSPELGVEIKQTMTFPFPAGHSQVKTHLRTTSVVSDPCSPPHPQASAVNLNVLFQDFSP

SEQ ID NO: 37159 - protein, 70 aa, Homo sapiens
MEPKKLEGIWACASGPDPVRRARGLSSPHLSPRDLAGIRGPGCCPADPPAPGLAAEKVFGQEAILFLSLK

SEQ ID NO: 37160 - protein, 29 aa, Homo sapiens
MLAPRPLSTMSQSNVSPSPDATAQSWTFQ

SEQ ID NO: 37161 - protein, 70 aa, Homo sapiens
MNPPMYLTLPLRRASPWQKSENAPGETHAQDKLSASQFAQFIKKLCGVTGTNDEASPGSLTSYPSHLLDR

SEQ ID NO: 37162 - protein, 61 aa, Homo sapiens
MPRQETEDTNCFSITKKIGRERWLTPVIPALWEAEAGGSRGQEIETILANTLPKREAPPVL

SEQ ID NO: 37163 - protein, 67 aa, Homo sapiens [sequence omitted]

SEQ ID NO: 37164 - protein, 59 aa, Homo sapiens
MCGRTWLLTRVVTGVAAAEDSHPFFVSAERRLHGPSSLQLFHLLPCVEPGFCTESEMPF

SEQ ID NO: 37165 - protein, 39 aa, Homo sapiens
MGSPWKLLSGGGTCSPGLTPSCIGESEPGRDRAVGESLR

SEQ ID NO: 37166 - protein, 270 aa, Homo sapiens [sequence omitted]

SEQ ID NO: 37167 - protein, 70 aa, Homo sapiens
MKLQEGHTVLLSLPLRLAGTETAEHGGPSYPFTDSALRAGEDGPDLPRALAAPRAPRAHPAGLCGAAAQP

SEQ ID NO: 37168 - protein, 138 aa, Homo sapiens
MSSWSPRRAGGPTRPCTALQALSIPARCTPSRKPWPCWSPMRGCPRTSMWLGPLRSWLVPSSSTPFSLGPMGTCTAWCEAATVSLSLRLPCSSARWPPPWRTVTSTVWSCVISSCVALSSLTVRGRSWCWRTWRTPAC

SEQ ID NO: 37169 - protein, 31 aa, Homo sapiens
MLYIHPFLWLAAEDGMLSLLEDLLPVRLQKM

SEQ ID NO: 37170 - protein, 113 aa, Homo sapiens
MSPSPRWGFLCVLFTAVHPAPSTAPVQDKCPVNTWEAMQASSQQLLQTDPRPKPFLLPPLPPLLLISAGTEVSSLVFQKSPLHTQPEGAIKTVGQPTSVHSKVLSKGSLLLGE

SEQ ID NO: 37171 - protein, 36 aa, Homo sapiens
MKCVQKLSVSLDFYLELSPTAQDWLLKLHNLMKNLR

SEQ ID NO: 37172 - protein, 81 aa, Homo sapiens
MQIKYFPPQKTYLGVGPQPDFQIAGLIFAASSPRRAQGARPATCSLWLRPSFRLGPPGLRPLCPARSVTVLLAATYRTQPP

SEQ ID NO: 37173 - protein, 27 aa, Homo sapiens
MCKLGDLPQHCTISWVHSRQSLLAKAF

SEQ ID NO: 37174 - protein, 41 aa, Homo sapiens
MFRLSLFFPLLQTMGTLGSLGVTMLHLLFICLGKSCSSHTL

SEQ ID NO: 37175 - protein, 40 aa, Homo sapiens
MTSWHPALLHICPTGVAVAPSCKAMLKKLWKQEGSMDSKN

SEQ ID NO: 37176 - protein, 15 aa, Homo sapiens
MGNKTCQQLHGYFSI

SEQ ID NO: 37177 - protein, 45 aa, Homo sapiens
MFAKSLLSPNSLLLAVSLCQLLLSIGEDCFSSPLNMGWACNLLDQ

SEQ ID NO: 37178 - protein, 54 aa, Homo sapiens
MATCFRVVSKRKTSMVPHLQGKHHPKVRMPRGRNHGGFLNRLSATAGARDDTAE

SEQ ID NO: 37179 - protein, 27 aa, Homo sapiens
MRRQEETTGTHIAGMQMGSVLLTLAMG

SEQ ID NO: 37180 - protein, 51 aa, Homo sapiens
MRRPLRVVLFLHPLRLGLALGFSGYLDTPFLCGQVSRGSQHQQPTLGHTSL

SEQ ID NO: 37181 - protein, 107 aa, Homo sapiens
MKVELRWPTAISTLWSTTLHPDCMEVGLSLQLDLGHHLSPRGTFCLTLAPFERFFYSISSLSCHHVKKDMFASPSAMNGQGPAVLPRLALNSWLQTVFPLGLPKCWD

SEQ ID NO: 37182 - protein, 37 aa, Homo sapiens
MRAGTRCSPAPRSRVPQLPSRPFLRFPTLGGPGLPRL

SEQ ID NO: 37183 - protein, 30 aa, Homo sapiens
MRPYRGLTLLAGFPSSRGRGLCFYFRIPQL

SEQ ID NO: 37184 - protein, 39 aa, Homo sapiens
LATLLPSLCIFAVPPYTSFLTAVLISCRKIFSFHFLQGG

SEQ ID NO: 37185 - protein, 23 aa, Homo sapiens
MPLRSGITPLLSAAWATVLILCW

SEQ ID NO: 37186 - protein, 34 aa, Homo sapiens
MSSSQAAASLWVTSMRHPLPPTWTSTCTSCAPIT

SEQ ID NO: 37187 - protein, 75 aa, Homo sapiens [sequence omitted]

SEQ ID NO: 37188 - protein, 34 aa, Homo sapiens
MHCPVRCFYWRSLCAELLASVCVGMGEKCGRTMR

SEQ ID NO: 37189 - protein, 16 aa, Homo sapiens
MPRRACGSGVIFSLLL

SEQ ID NO: 37190 - protein, 102 aa, Homo sapiens
LDTSLKSSRLRPSPARGEVRGVRCQPLAPGRASLLMHRGRARPSDSSRGGRAPSVSFALEPPARVGFSGIPTVQDYSTSRLITFFSSSSAKASLKKNITNFF

SEQ ID NO: 37191 - protein, 38 aa, Homo sapiens
MCGKGMGMCGLGAGAPTHSGGQAVSRTTCCKAREGRRR

SEQ ID NO: 37192 - protein, 60 aa, Homo sapiens
MVSHRKDWRRVNLRFSSCLLLSICLDDKPSADELCFWTDHGRSQLTCPSLGVSQGHARSS

SEQ ID NO: 37193 - protein, 57 aa, Homo sapiens
LKLFSSKVLKVNLRFSSCLLLSICLDDKPSADELCFWTDHGRSQLTCPSLGVSQGHL

SEQ ID NO: 37194 - protein, 28 aa, Homo sapiens
MLESFGTPLISLLLLTFIYYFSKCESNT

SEQ ID NO: 37195 - protein, 67 aa, Homo sapiens
LNNFSWIFFPLAFKVQVRMISPFYEAIRVGMELQDVGTWLPSILLLCHTYGVSFICLVQFCSSSTSS

SEQ ID NO: 37196 - protein, 20 aa, Homo sapiens
VESLLLLFVSLWRGFCGPEP

SEQ ID NO: 37197 - protein, 310 aa, Homo sapiens
LLATWKFSSGHNFCRVDLGKTPAPRIPSKLSSAGHPRRPVMPTRGEEAVLSRPLLPRPPRRPGLGCGGPKAPALLVISRPEPRQASAPSRKPGRPGATGKKARSRKPGCCGPTNHKSYERGSRRREKSQYRLVPATFGKKKFLTRRGACFALGRVALAGAWVTPIPPWRLTSCRGGPPASSWPRAQGASCPGTADAGIASPGRAGGEGGRGGRGTAGCSPPWGIRGAEPRWRPRGPGSRERTAEWPPELGLLLSPTHLPSDTVSTLQAAGRGGAPNQFAPGLSARLPHGNRTATGTDGVTYLPMQRQRLA

SEQ ID NO: 37198 - protein, 10 aa, Homo sapiens
LLLLLLLWDR

SEQ ID NO: 37199 - protein, 26 aa, Homo sapiens
MVAAVGDVQFFFLFPSTDAEQTCLSA

SEQ ID NO: 37200 - protein, 84 aa, Homo sapiens
LLSAGPLSLGLMTSLLCGTSRFLPTVNSGPPSDHCSLRTRPGLGRADPNKGKMVNANVPLQFYRQCAVVPPPPLRVLVGTRRGL

SEQ ID NO: 37201 - protein, 44 aa, Homo sapiens
MSLAGLQHSPHGHSHAAFRTFLKEMPKDSANTGEAEDTRSLDVK

SEQ ID NO: 37202 - protein, 127 aa, Homo sapiens [sequence omitted]

SEQ ID NO: 37203 - protein, 41 aa, Homo sapiens
LAAVPLASGMLSEEKLKGRLCPKRSLCAPAFPPDLQVMRVL

SEQ ID NO: 37204 - protein, 32 aa, Homo sapiens
MNFFHLLWRQFSFSSVIPSCYSVPSHPVFLGK

SEQ ID NO: 37205 - protein, 39 aa, Homo sapiens
MGDVLLSCIQILPTKAITIKKHKNLSMLAVIFECLWLSE

SEQ ID NO: 37206 - protein, 42 aa, Homo sapiens
LAQGRRLHHISDTSLSFSPLLLPPAHIASPLPPPSPAGLLAS

SEQ ID NO: 37207 - protein, 26 aa, Homo sapiens
MALLDLLMLSLIKTLQHFSQAVFTHY

SEQ ID NO: 37208 - protein, 30 aa, Homo sapiens
LNMLYILMNSEKECGVSLQMSSSVVSFPLQ

SEQ ID NO: 37209 - protein, 38 aa, Homo sapiens
MREGHIYTGARTSLLIHCCIGEAWALGVVLGLMSELTK

SEQ ID NO: 37210 - protein, 46 aa, Homo sapiens
MMPPVRDGTRHSMQMTTQREQEWLYLYQTKSTLSQKLSQETLKYII

SEQ ID NO: 37211 - protein, 12 aa, Homo sapiens
LFCLFVFCFFLS

SEQ ID NO: 37212 - protein, 50 aa, Homo sapiens
MAGACPLCPAAACRAGSHPTSPSPSRHPRKRPRPLASRTACCLRVFRIGG

SEQ ID NO: 37213 - protein, 37 aa, Homo sapiens
MNMKKCPMSLLATLFCGSSHWWCLGSPLSSGSWAMGL

SEQ ID NO: 37214 - protein, 117 aa, Homo sapiens
MGAFLLATSLKWNLLVALLPLQLWCYTEKLEETGFHYVAQSGPKLLVSSSPPISAFQSARIIGMSHYIQLLLVSSDSCFDTTDLSFKTDKGKRETSESLIKVEASYFYQRIHCAWTL

SEQ ID NO: 37215 - protein, 120 aa, Homo sapiens
TARSWSEASRAERARRWGREDAQVAALPCRTVTATAGVAAAAPPNGRSRPSSAAWPTACTCASTWSGCNALTRAARAAAAASSSRGRSGPTAPSLLKVMQMKSFCLIFHLRAMSSSKASL

SEQ ID NO: 37216 - protein, 10 aa, Homo sapiens
LITFQFCFVF

SEQ ID NO: 37217 - protein, 29 aa, Homo sapiens
LCTFSFPSCLFFFVVLYSCCLSTMCQTLC

SEQ ID NO: 37218 - protein, 16 aa, Homo sapiens
IKYWSKKLVTFLYMVR

SEQ ID NO: 37219 - protein, 20 aa, Homo sapiens
LTKVPWSFMSQHILLFLFLQ

SEQ ID NO: 37220 - protein, 11 aa, Homo sapiens
MFIVMLLIMHC

SEQ ID NO: 37221 - protein, 27 aa, Homo sapiens
LDFQWQLQWPFMWLAVSLVVTSTQLCL

SEQ ID NO: 37222 - protein, 61 aa, Homo sapiens
IRQGGRILPLTTCVTSGRIGLFAEASWWPLLAQEETYILIFLYHGFGSQIAAWYLFSQKIL

SEQ ID NO: 37223 - protein, 26 aa, Homo sapiens
LERGLLKITAAAFGLGSVLSACARTG

SEQ ID NO: 37224 - protein, 46 aa, Homo sapiens
LPLAFCFLLTGFGHWFFIFCLLHASRPPHLLPHSLDPALWAFTSVL

SEQ ID NO: 37225 - protein, 16 aa, Homo sapiens
LYWVSLMPAWTILEAV

SEQ ID NO: 37226 - protein, 33 aa, Homo sapiens
MTAFLNTRLYIFNFKMFLCALQIFFTVSDCMEI

SEQ ID NO: 37227 - protein, 35 aa, Homo sapiens
THHRLAFQDTSCISDLLHLCYLGTSVILAASTCLS

SEQ ID NO: 37228 - protein, 20 aa, Homo sapiens
ISKYTRLIFRSFSVLLSVVV

SEQ ID NO: 37229 - protein, 74 aa, Homo sapiens
MSFFILLFFKHQILLFFFFLPSPQIPSQIILLTTIPTGRGELKHLLPLPCFSFIFYFFASVLMFLHTLHLYSKV

SEQ ID NO: 37230 - protein, 45 aa, Homo sapiens
RRRLCGAELRRTSQLGQWLRRLPAPPLRFIWIQGWLSTVPAALSS

SEQ ID NO: 37231 - protein, 24 aa, Homo sapiens
LFFVVYFCIFTCGAVASPHIKYRT

SEQ ID NO: 37232 - protein, 11 aa, Homo sapiens
LLWLYRITLCL

SEQ ID NO: 37233 - protein, 55 aa, Homo sapiens
IVSQCILPSWLPTLAAKAAATCCSLHSFGKRKGTSDLPDRFLSQQTICRRNKDGC

SEQ ID NO: 37234 - protein, 73 aa, Homo sapiens
TAAGGGGDTKQEASGRPELGADIHTHIHTDTQSHTHSHTLSLSLPLSFSLSLSLCPFLLDRSTVIHRNKHTRT

SEQ ID NO: 37235 - protein, 168 aa, Homo sapiens
VSFLHILWGFCTPSRWGLASSEPPLPLGFPSSGCSPYPLGAPRSQVGVFLLGTPQYVLSSLTSGAPLCFPLVCPLSLSLLVLSQVSEHPHFSGSGSPALLSLPLCAPTSVSVVSPLCASCAEGPPLSLLLCLGPLAPPCFFSPSPLSPLLSAPCLPLPFSVFAGSLGL

SEQ ID NO: 37236 - protein, 14 aa, Homo sapiens
KPIKVFLLLGAIIF

SEQ ID NO: 37237 - protein, 18 aa, Homo sapiens
IHCLSLVFYSPWLLLISR

SEQ ID NO: 37238 - protein, 165 aa, Homo sapiens
IGFVAYSGPSHTTQPHKYWLLLDGQADPAAAEGPVKRKAASVVWWPQALRHLSLLVHCWEESYEMNIGCQSLWAGGLASSGNGWDLGVAFRRDTCMSSSSLHWKEFKYAPGSLHYFALSFVLILTEICLVSSGMGFPQEGKHFSVLGSPDCSLWGRDEHVPREFA

SEQ ID NO: 37239 - protein, 10 aa, Homo sapiens
ILLMYYFTLQ

SEQ ID NO: 37240 - protein, 45 aa, Homo sapiens
MGLTPLRPGLHPHLPTSPTTATSPLRPSTLASLIVAPSGVCQGLG

SEQ ID NO: 37241 - protein, 37 aa, Homo sapiens
IQLRLSSESSHMVALGRSLARRVMPAILLLKYLPGME

SEQ ID NO: 37242 - protein, 26 aa, Homo sapiens
IKKRPLIRRRLLVSFLGTHSGFLQSR

SEQ ID NO: 37243 - protein, 15 aa, Homo sapiens
ILLFILCLMHSYFTP

SEQ ID NO: 37244 - protein, 34 aa, Homo sapiens
LIKTFPLKLASGLISLFQESLWLVGFQYAPVPDC

SEQ ID NO: 37245 - protein, 10 aa, Homo sapiens
IGYLVYTLCI

SEQ ID NO: 37246 - protein, 26 aa, Homo sapiens
VDFALLLSWSSVLELVLSLSLCTFPV

SEQ ID NO: 37247 - protein, 100 aa, Homo sapiens
IFLLLLFFSNYTWAPFFVLDFSTLFPSLLCCCFLISSTKIFLSGVYLIGSVLSSPPPPPPSLRCVCRCRCCRRRCCCCSPRRYTNPRLFVSPLGSVEFLC

SEQ ID NO: 37248 - protein, 13 aa, Homo sapiens
VWDFWVFSWLASC

SEQ ID NO: 37249 - protein, 132 aa, Homo sapiens
KWPLLPAVVVQCRVRAASVASCKESLRGPKSAALLLAFASSSSRFPTVKSQRHLQRPPGPTETDPQRLARSCLLHREPPSTGEGLAGGVGRWRRRHGEVPEGRPGRCRSYVTLPLLHGPVSVRRWETRRPNP

SEQ ID NO: 37250 - protein, 18 aa, Homo sapiens
LSTPLPNVEVLQESVLWR

SEQ ID NO: 37251 - protein, 11 aa, Homo sapiens
LHMSAWLFLLF

SEQ ID NO: 37252 - protein, 52 aa, Homo sapiens
IQPFPIRLPLLPPLISFLHTLQVVCSVIMKSIRKAFVLCGFLYFEFFDQKTD

SEQ ID NO: 37253 - protein, 33 aa, Homo sapiens [sequence omitted]

SEQ ID NO: 37254 - protein, 29 aa, Homo sapiens
LYLNFFILKKQIGLCVWLVVIRSFLALIT

SEQ ID NO: 37255 - protein, 16 aa, Homo sapiens
LLITMVVISSLNAGFI

SEQ ID NO: 37256 - protein, 29 aa, Homo sapiens
MILKGFLLMVAFVLSSKILFSVVCKQVFF

SEQ ID NO: 37257 - protein, 41 aa, Homo sapiens
VVCALSSLPTPALPSAAVSLPPGPPCLQEHLCARVPGPRHG

SEQ ID NO: 37258 - protein, 39 aa, Homo sapiens
IIRSDVKLASQALITTWPTPWPAPLASAARAALRPLRRS

SEQ ID NO: 37259 - protein, 56 aa, Homo sapiens
LAASVLTLVTLGRSLTLRALWHPRLKGAVILQPCWGSSLDQAMVVKNVSQGQKTTQ

SEQ ID NO: 37260 - protein, 36 aa, Homo sapiens
MFANGVALWSCVSSELHCDVVGWGPTLLPCLPVAFL

SEQ ID NO: 37261 - protein, 32 aa, Homo sapiens
MHILSLSLFLSLSLPLLPSLPPSLSFLQKCQV

SEQ ID NO: 37262 - protein, 16 aa, Homo sapiens
KISRALAELHLLAFLA

SEQ ID NO: 37263 - protein, 14 aa, Homo sapiens
VVLGVLLTIILVPG

SEQ ID NO: 37264 - protein, 16 aa, Homo sapiens
LILPVLSLPAVLVVLC

SEQ ID NO: 37265 - protein, 26 aa, Homo sapiens
KYYAVATGFLLWNVCICWLVLPQLCY

SEQ ID NO: 37266 - protein, 28 aa, Homo sapiens
MGTLGSLGVTMLHLLFICLGKSCSSHTL

SEQ ID NO: 37267 - protein, 93 aa, Homo sapiens
MDSKLGVKVHTWVSEAQYRFLEQATLYKLKFMKEWIQVKLHQPPEYDSNIPSGIKENASEDWNTAQPSQPSFTTDVSTLVIFLLILMLLSLYN

SEQ ID NO: 37268 - protein, 31 aa, Homo sapiens
KLTLVLALGVMSRDGGTDGDACTCVCMGAYV

SEQ ID NO: 37269 - protein, 74 aa, Homo sapiens
LFASFVFGSFFFLPNFGFISRRIWLWGKRKKSRITRSTTTNNNKNHQDIFLQISDGFKFMKQLSPFAISIWISE

SEQ ID NO: 37270 - protein, 64 aa, Homo sapiens
LPDSPGQPLPAASLRLEPTPTSQTGQGAHPFMLLWLLMLGRSASFCSVADKLQWTLAQRTGPHP

SEQ ID NO: 37271 - protein, 38 aa, Homo sapiens
MFSQVYFLFLIFSPSLFFYFFFMEKWGNLAVSILKTEV

SEQ ID NO: 37272 - protein, 15 aa, Homo sapiens
MLKFLWGSIFALAFW

SEQ ID NO: 37273 - protein, 12 aa, Homo sapiens
IWLFIQISTYLT

SEQ ID NO: 37274 - protein, 69 aa, Homo sapiens
IIAPKDYNFKSHRRRQIAHGHASCWLYTRTKTDKYPHHDVTHIAADFFREKCVLLLFETSVVVALYCNI

SEQ ID NO: 37275 - protein, 64 aa, Homo sapiens
LYMEPWPSLWGWMPHSTASWRLLTMAGAGWSWLPTSACSVLPRWGPSCSMRCAGWPEARQAKLG

SEQ ID NO: 37276 - protein, 51 aa, Homo sapiens
LALWRLGGAAAAAAAAAGGPFADVLLSLNISPFENAWEVQPSVCPSTNLLC

SEQ ID NO: 37277 - protein, 39 aa, Homo sapiens
KMLGCLLVVFLCCLILGKLLCKAKNPVNTILSFTGRHYW

SEQ ID NO: 37278 - protein, 56 aa, Homo sapiens
LLAARNLRTKFEVISECAGLHSMNSVSSHLIHRYIFLFLPIFSFPQIFLLLFYHLE

SEQ ID NO: 37279 - protein, 71 aa, Homo sapiens [sequence omitted]

SEQ ID NO: 37280 - protein, 66 aa, Homo sapiens
LGRPPVGMGLSVLLPLCLLGPGRFTSGQKPLDTPGLGAAVLSVRKAGLKMRSHLTPSVCTVPSPGS

SEQ ID NO: 37281 - protein, 67 aa, Homo sapiens
LPKTPRGARMSLSRAAQGPHSWLLTLASPMAALQTLLLSSPHIRTCCSHSGVLKSMNRYCCIFHNAD

SEQ ID NO: 37282 - protein, 81 aa, Homo sapiens
LRLPRQGAGRAAKSDFELQLAVWNVAQEALIFLAGTVAAVLACGPGQPLPSRRAGEDWCMLGFVVRPHEARPGNIMGRNGA

SEQ ID NO: 37283 - protein, 8 aa, Homo sapiens
LLPFLVLL

SEQ ID NO: 37284 - protein, 46 aa, Homo sapiens
ISANLGFWVLASFLLFVDFGVQVPQLLRAAEDLLGPHINEAATWRV

SEQ ID NO: 37285 - protein, 56 aa, Homo sapiens
ILLLILQFQRLLHSLGMTRTPSPATVAVRQLALRVCPAWSLATTCGPARMAAMSWA

SEQ ID NO: 37286 - protein, 15 aa, Homo sapiens
VFFFWFLFCFSSFKG

SEQ ID NO: 37287 - protein, 117 aa, Homo sapiens
LRRTLRGRGAAAAVVAAAAGVGAAAGPGGWSWRGGVLAVWRGGRRQGPGGAPGSRRCWTGGCSGAWAGGPAAGRPGPAGPRYDKIRTPARTTRRCRLEPLSPRTWWQAPWQGSWSTA

SEQ ID NO: 37288 - protein, 24 aa, Homo sapiens
MWWVLTLFFHKTMWVSMVAINKTP

SEQ ID NO: 37289 - protein, 44 aa, Homo sapiens
ITACVYNVSGITLLHVAFLLLGFCFCSELSCYLFRADVTCRWRV

SEQ ID NO: 37290 - protein, 20 aa, Homo sapiens
MSGAFLYSVIFCAVFLLDVS

SEQ ID NO: 37291 - protein, 62 aa, Homo sapiens
IVSQCILPSWLPTLAAKAAATCCSLHSFGKRKGTSDLPDRFLSQQTICRRWLFAFIRNKDGC

SEQ ID NO: 37292 - protein, 18 aa, Homo sapiens
LGSQIFLPLAFGSTLFSC

SEQ ID NO: 37293 - protein, 26 aa, Homo sapiens
MRSQMEKKLKVFSFFTLHGGAWLLRL

SEQ ID NO: 37294 - protein, 41 aa, Homo sapiens
MLSLSCYEIRKLSPFPFPSFVYMLCPFLSAFSHHPYSPKSG

SEQ ID NO: 37295 - protein, 55 aa, Homo sapiens
VKHLEQFLAHGRIGLFAEASWWPLLAQEETYILIFLYHGFGSQIAAWYLFSQKIL

SEQ ID NO: 37296 - protein, 94 aa, Homo sapiens
MTLWRWWRRPLGRASRSWGPLVCKCPVSWVVWAFATPSTPVWWRSWACMTLAWALPWGPIRASVSKASCSLAQRPRKKNTSPSWHLGRLWPLSV

SEQ ID NO: 37297 - protein, 32 aa, Homo sapiens
LVFFGNQCSCKSNVCFVLLLLKLMLLYITMEF

SEQ ID NO: 37298 - protein, 31 aa, Homo sapiens
MQSSHSSILWSASLGCVATHLSFMSSSAMPR

SEQ ID NO: 37299 - protein, 109 aa, Homo sapiens
LARVLTSFSDRDLVAGSRKSPALLPDPFLLSLAGFLLPASLASISQPRDSLLYSRAPVARHPEPSHLQPSVFCPSLTSEGPALSFSPESPRFLSLPCLPALDSQIPADV

SEQ ID NO: 37300 - protein, 24 aa, Homo sapiens
ITSNSSQTFLVATLGILRFSLACP

SEQ ID NO: 37301 - protein, 19 aa, Homo sapiens
LSVVYSINMFLAGLSGSCL

SEQ ID NO: 37302 - protein, 34 aa, Homo sapiens
MCPAARASAAARAAAAARAAGMPGRRAPGLGPRR

SEQ ID NO: 37303 - protein, 116 aa, Homo sapiens
LELRPCVFSRLLIRRGALGAPAWVAVPSVCGPQFLGPRRGFVGAPGDIWAVLAVSGSRARSLPGLTAADLVLHFLGGAWTLALRGRPVPRSVATDPRTLFAGDSRSLRLPRMMACD

SEQ ID NO: 37304 - protein, 89 aa, Homo sapiens
LLPGDPLSSHLLLLPLLLHRARARTPPGCRSRTAPARTTRRCRCCGTRRSRWPCPWCTRWWRRSASRATSSLCGCCAGAWGPDPRRSSS

SEQ ID NO: 37305 - protein, 55 aa, Homo sapiens
LVLAKFVILRNSAVLSSTASFCLPCSFPDVIQVAEFRCPCFGSLSLCLSFFPCSR

SEQ ID NO: 37306 - protein, 7 aa, Homo sapiens
VWFLLGF

SEQ ID NO: 37307 - protein, 52 aa, Homo sapiens
LVRQILFFFFPRALAPCPLVAFVGARHAAGRPRTRSSPAGKYASDSSLFSNV

SEQ ID NO: 37308 - protein, 27 aa, Homo sapiens
ICVYSYLTVLFFLLIYINSFLPFFLNF

SEQ ID NO: 37309 - protein, 115 aa, Homo sapiens
ISPFSSCLQCGYKSGIFLLLLFFSNYTWAPFFVLDFSTLFPSLLCCCFLISSTKIFLSGVYLIGSVLSSPPPPPPSLRCVCRCRCCRRRCCCCSPRRYTNPRLFVSPLGSVEFLC

SEQ ID NO: 37310 - protein, 94 aa, Homo sapiens
IAAAVFPFFFCRRLLCLFSSFLALLLCSVTSPNPLPTQPAPFFFCLRCSISPSAAAATAAHSWCRCRAFTPKSFPQPMAQAALGISAQGNHIPL

SEQ ID NO: 37311 - protein, 39 aa, Homo sapiens
VANRHFSYFLKNSNLFATFISVDFFFLVVWGPLAKRAEV

SEQ ID NO: 37312 - protein, 60 aa, Homo sapiens
LPLRAPLSLGPFRTLFAHKLPKKKEPTCWYCWLVSLWSTSLLLLCYLLAPLPMSGWFPIR

SEQ ID NO: 37313 - protein, 86 aa, Homo sapiens
VPASQWPGLLRLVTPLSLTPALGARAPPPQRPAVRGPTAARAPAPRTVPGRLAPWRPPAAPGDPCCCYCCCCCSASCIVRQQQCLW

SEQ ID NO: 37314 - protein, 18 aa, Homo sapiens
VRPPWLWRSLLSGSFCLS

SEQ ID NO: 37315 - protein, 13 aa, Homo sapiens
MYVSPGLFFFFFF

SEQ ID NO: 37316 - protein, 43 aa, Homo sapiens
IILTLSQCQVSKCLLNDHRRLVLVVGVWGSVLVIWMLVIGVQY

SEQ ID NO: 37317 - protein, 35 aa, Homo sapiens
LTIFFLPLATSLPTCFLSTLVQLFLQRPRSSELHI

SEQ ID NO: 37318 - protein, 54 aa, Homo sapiens
KKRSPRWSLTMAPACAKLVLLGTTLPEPCFLPSSGAPDTRTPTWATRPRASVAS

SEQ ID NO: 37319 - protein, 54 aa, Homo sapiens
MQLCQPGPVPPPLRGLPLRPRALRPLLPPHLPAVGLWAGLLGGVPVCAAPHAVL

SEQ ID NO: 37320 - protein, 85 aa, Homo sapiens
LRSPWLLFLLPQVGTGDASSFSQDRTMSLAAAPVREAPPPPTGASSEPSVPALPGADPQRSAELLLLAVTREGLERRIISRKRAE

SEQ ID NO: 37321 - protein, 58 aa, Homo sapiens
MAVLCTEGSDVSKVRSANLGRSPEIEPGSSSSLPFLPPHRVSLLFFFSDILSWFMFLR

SEQ ID NO: 37322 - protein, 54 aa, Homo sapiens
LHTLLPLRLKFRILVTSALIFHLQHPQPWHPGWEGLHLSLPSFPVFKTFLEGDT

SEQ ID NO: 37323 - protein, 49 aa, Homo sapiens
LKGAPCCDRHFDFLSFYSMDTTLLKTCFGTATEFIFCGFMTKLLVVSLF

SEQ ID NO: 37324 - protein, 57 aa, Homo sapiens
LRWSLALLPRLESSGVISAHCNVRLPGSSDSPPSASRVAGITGAMFQNRVRPLVKKN

SEQ ID NO: 37325 - protein, 8 aa, Homo sapiens
MNSVLAAR

SEQ ID NO: 37326 - protein, 23 aa, Homo sapiens
MLTCFIKACERESPLARGHCSLI

SEQ ID NO: 37327 - protein, 70 aa, Homo sapiens
LVAAVVALCAGAELTGRSGRLWPRQLKPGLLMLPRLVLELLGSSDPPASAFGVVTGLKISFFAEGTHLLV

SEQ ID NO: 37328 - protein, 20 aa, Homo sapiens
VRGLLIRILVLSVSVCEWIP

SEQ ID NO: 37329 - protein, 36 aa, Homo sapiens
VHELPMWCLVIAVSVALPCFPGWVFASHHGGRARGD

SEQ ID NO: 37330 - protein, 44 aa, Homo sapiens
VHELPMWCLVIAVSVALPCFPGWVFASHHGAQGQSGHEREEADI

SEQ ID NO: 37331 - protein, 83 aa, Homo sapiens
VHELPMWCLVIAVSVALPCFPGWVFASHHGGFCTTGTWLSCGWSSIAHQAGGENEEDRGLLTASHHSSAAQGQSGHEREEADI

SEQ ID NO: 37332 - protein, 70 aa, Homo sapiens
VTGCVCEVWGAGGQQQGRWVVGSSQPPAADPALPDMVRVSLRSFHPPVFPGGCLLSLPVPTSSSWLWPRF

SEQ ID NO: 37333 - protein, 50 aa, Homo sapiens
LLSGGRPTARSFFSALVRFLFGFLPASGATRVARQQPLGDLVLGSCPAWG

SEQ ID NO: 37334 - protein, 80 aa, Homo sapiens
MSSPPLSPGPLLLTRATSESWGQREVGSMPPGVGELGARVPLEFPVVAHGGAAPGPASAASLRRCAEAWCARSEPPYWVQ

SEQ ID NO: 37335 - protein, 89 aa, Homo sapiens
LLLLSCLLAVPAVPAVPALSPLLPRLLDAGDASELVIGALRRLGLIPKISHYVHANQRSIVMTPGGHPVTPITALSTSTQRQSFLASLL

SEQ ID NO: 37336 - protein, 56 aa, Homo sapiens
LLLLSCLLAVPAVPAVPALSPLLPRLLDAGDASELVIGALRRAQAPSSARGAQAAP

SEQ ID NO: 37337 - protein, 80 aa, Homo sapiens
MPAGVGPADPGHWSHSSFPTDGPEGPPAAPARVSVACKERKRWEQPARGPASCIGASGRGIGSSRHPEAWACKHRSSGWP

SEQ ID NO: 37338 - protein, 48 aa, Homo sapiens
MWKRRPSAVLGEPLLRRMTLTLRPGLASPSLLQTHRTGLMGRAQAKRS

SEQ ID NO: 37339 - protein, 59 aa, Homo sapiens
LRAVGPFMGLTWWIHIKPVSVGTSVLAAGGEGKPDPAPPGGPSGVWLGVKGALWQYGVG

SEQ ID NO: 37340 - protein, 10 aa, Homo sapiens
MGTGRDRAAG

SEQ ID NO: 37341 - protein, 108 aa, Homo sapiens
MVRGGSSFFREGAGGPRGALGNRAGGRDRPGGPGGRKDQASGRNCGAGTDQEGAVGRVQPGSARRERGPRFGHSEKPAGAGSARSSLDLCRESLAPFLFICLNITPNF

SEQ ID NO: 37342 - protein, 63 aa, Homo sapiens
LGPRSRALGRQLPWCFSLLGRGLGLWLPCPWGSPGHSRGLESPGQPLLEVGLSVYGRLQGQQA

SEQ ID NO: 37343 - protein, 48 aa, Homo sapiens
MRCARSRGRVAAAAVGAPGPGDAAVARAPPRPHRPHGAPGGRRHRRDR

SEQ ID NO: 37344 - protein, 39 aa, Homo sapiens
LFLEGIYVLVCCCVVSPKSQSDEATKRPPELQESSSSLG

SEQ ID NO: 37345 - protein, 96 aa, Homo sapiens
VTEMGWEGPNSRVDDTFWASWRAFAQIGPARSGFRLETLAGLRSRRLKQPKRLQEAVSVRFGGRRCAGSCILSSACEKLKDVEKSRPWNPALLQPS

SEQ ID NO: 37346 - protein, 36 aa, Homo sapiens
LGGGQASGSREPDPHLSSKQAQRVSCTGAWAGGRCF

SEQ ID NO: 37347 - protein, 95 aa, Homo sapiens
MILIRKLFLRRCHWGGWLLPPARASCSGKHSLSHSCRGPRVQRPPHPRFWAGTLAPGPCPGLWCLPGLVQVDVLAAGRCDHLSCLPPLCPQAFLL

SEQ ID NO: 37348 - protein, 33 aa, Homo sapiens
LTPDNMVGTVYILVFVFCFLETDSMLPRLLWNS

SEQ ID NO: 37349 - protein, 70 aa, Homo sapiens
LQVAPETCPCPGVHLRVSVLVPSCFFVLFCFVLFLRPNLVLSPRLECSGVILAHCNLHLPGSSESPASAS

SEQ ID NO: 37350 - protein, 132 aa, Homo sapiens
VSTTSQSGTREYPAFAFARRGAYQSEFWGANRAVCPWQASGGLKEVAGSLCVLQIVTLMVAPSLALLPRLGCSGTISAHRNLRLSGSSDSPASASRVAGIASIHHHAWMAWLEDKQIEDIGNGVIKMIDHEA

SEQ ID NO: 37351 - protein, 19 aa, Homo sapiens
VAGSLCVLQIVTLMVAPEL

SEQ ID NO: 37352 - protein, 119 aa, Homo sapiens
LPGDAQGRSFLARVLTSFSDRDLVAGSRKSPALLPDPFLLSLAGFLLPASLASISQPRDSLLYSRAPVARHPEPSHLQPSVFCPSLTSEGPALSFSPESPRFLSLPCLPALDSQIPADV

SEQ ID NO: 37353 - protein, 8 aa, Homo sapiens
MVFYLLLS

SEQ ID NO: 37354 - protein, 61 aa, Homo sapiens
VVVTQSLCMLSVIQTGNLVLCSRGPRLLSHIKSPRPLWTLNCTCLSHFLQIMINAISVSKL

SEQ ID NO: 37355 - protein, 66 aa, Homo sapiens
LRISCPSVEKALMCPLSRVGLGGRGTPRPGDGKVTGGPRMRKRSHGQSGIGCGVLAAVLWHCVLPP

SEQ ID NO: 37356 - protein, 115 aa, Homo sapiens
MGRKSGSRTGSLCALWGPTNPPRLQAFLPHAGSPARTMSPLCWLRRGTWRWGKALLLDISTPPHHWQGNWWRGRGGGGRHSRQQLEFYNGSSSQQDREGAWEGDAREARPCLPSF

SEQ ID NO: 37357 - protein, 94 aa, Homo sapiens
LALTALQLCSLPAQSLCRLGGCSWGSGHRAPGPGYCLLRTLASGLENRSPGWGRAWGQSHLQRRQQSGAGCRDGLARWQLQVPGRQALDAPKRW

SEQ ID NO: 37358 - protein, 54 aa, Homo sapiens
LAYFVTGHLISTCVGLILLLEMSLYPALHTYLGGVKRAQEGPTDTAWLRGLGRR

SEQ ID NO: 37359 - protein, 78 aa, Homo sapiens
LSFFTQRQSQASSPSQLPLKTSWAQAYFVTGHLISTCVGLILLLEMSLYPALHTYLGGVKRAQEGPTDTAWLRGLGRR

SEQ ID NO: 37360 - protein, 13 aa, Homo sapiens
VLWIYHSLLSLII

SEQ ID NO: 37361 - protein, 31 aa, Homo sapiens
LGLERLVTWLARGGARGVGSAGLGLVAPAAA

SEQ ID NO: 37362 - protein, 38 aa, Homo sapiens
MAKPWPICVCVTPLPSRLGLAAGIPLMRWVPGTLEPLV

SEQ ID NO: 37363 - protein, 30 aa, Homo sapiens
MGGKSWLFFYSLVFCALLPLPRREDPFKLF

SEQ ID NO: 37364 - protein, 47 aa, Homo sapiens
KKPMTLNKRPFQVSPTKAMTTWMIWMMKMMMTMWTARTPLTRTTLMM

SEQ ID NO: 37365 - protein, 15 aa, Homo sapiens
RDKILSYFQKLLLVL

SEQ ID NO: 37366 - protein, 14 aa, Homo sapiens
LVPWVICLLLCPCK

SEQ ID NO: 37367 - protein, 18 aa, Homo sapiens
LVKTMKIIYNATLLFLVS

SEQ ID NO: 37368 - protein, 42 aa, Homo sapiens
MPYCYLAGSTTGQKNENCRYLFCVFLSRMVDVRDPTKDLWTH

SEQ ID NO: 37369 - protein, 64 aa, Homo sapiens
VVFYTDMLDTWCQNLGQGDSFVRPAPCPGPHSVKRSTCDLGSSDQPKEHLTNFKSDLLGLVAED

SEQ ID NO: 37370 - protein, 55 aa, Homo sapiens
LFCKTHRVSLTHCRYFPGSMVNQHHLSVSSLLTSPGLSVVYSINMFLAGLSGSCL

SEQ ID NO: 37371 - protein, 49 aa, Homo sapiens
MSRLSLSWESLTNAIWPLDLQDIKGYLPNPLPQRVNLRKQILSISKEPN

SEQ ID NO: 37372 - protein, 118 aa, Homo sapiens
LPADLWIRSLLTGCVTLGPELPLSGPQRPYEGPLLQEHPHDIAFGGAPVACRIACGLCNLLRFKTDGHMCQWGSLSPGPKKQGTKFKTLASSQPLKPWPPEFPFLSLSFYFFYFYFYF

SEQ ID NO: 37373 - protein, 169 aa, Homo sapiens
VTQGVLTPPWPQFPHLKNGYRKGLSLRPQEALPPPPCPSCRSSAPSAPRGGRGETPNKGTGRSLCQSCHHPPVDVQAVLNKCFEADEAAGSGCVGSSRWGFLSSKTKSPSETPKLLPTSHPCFFLLLLFVCLFLKLSVTLSPRLECNAAVSAHCNLRLLGSSDSPASAS

SEQ ID NO: 37374 - protein, 86 aa, Homo sapiens
VILPHLFPQLTPLCLSLTLLSPQPKPGHTLAAGGLGFDHRWVLFHFWFKNLLTWVMSCTQVLLVGKKQLLLHLHPSPMELAFSRPP

SEQ ID NO: 37375 - protein, 48 aa, Homo sapiens
MARPLSLAAAGAPDLLFTALCSLLIEAQPLRPFDLQVLGDPQPRARTP

SEQ ID NO: 37376 - protein, 32 aa, Homo sapiens
LPCCCTQKRNMYRIVNLILDLPALVIVTHASV

SEQ ID NO: 37377 - protein, 46 aa, Homo sapiens
MVLLLAQVVWATLDMGVHRASFTALIMSGSPPAGVCPADPDSTTDE

SEQ ID NO: 37378 - protein, 57 aa, Homo sapiens
MGWFWLVHRGCVQSVFMSCVSPFNIQNLILLHFNVNSPLEGEHGMYVTHMFAYQAHI

SEQ ID NO: 37379 - protein, 43 aa, Homo sapiens
LSLHRNLNSRMEFFLLCWDSFAWQGLISPLARGSLCSIFFNLK

SEQ ID NO: 37380 - protein, 111 aa, Homo sapiens
MRGLYRCHRGPGLLKWNPAWSRARPLARGRRRSSKGGAGLKPGSEPALTGAEIRDAAVSTVFYFTMDPSAWGARPGCPSSPGQPDAGTGGTCSGPGPWEGKKGPSRFTCLG

SEQ ID NO: 37381 - protein, 28 aa, Homo sapiens
MAPARATSSAPAAAASSAAATAPPAGCG

SEQ ID NO: 37382 - protein, 37 aa, Homo sapiens
MRAWRCLRYGLYLREMLEVEMKTLALNSSWRTTSFQS

SEQ ID NO: 37383 - protein, 38 aa, Homo sapiens
MLSLRAPLGRREASSGSGLRSVGASARLSPALAGLSGP

SEQ ID NO: 37384 - protein, 39 aa, Homo sapiens
MFSTWSRTEKLLCLCSLGTHWKLYSDIFWDLVWIVQTGA

SEQ ID NO: 37385 - protein, 42 aa, Homo sapiens
TLKIRCLQGVLWFLYFFFSLYQKVFFNGKKNNFLFSFTNEFQ

SEQ ID NO: 37386 - protein, 55 aa, Homo sapiens
GVFVVARDRRRRELRTGAFSLLLGVVALLPLCGKRIQALPRACGCGGPEVLVVPR

SEQ ID NO: 37387 - protein, 68 aa, Homo sapiens
MCRGIQTLENVPPEFPASSKETRASMEPPLVAGGLSPRGIHHCRPLGGTNLEMGLVERGIEKSRRAYK

SEQ ID NO: 37388 - protein, 15 aa, Homo sapiens
MIGRRIVVLFSSLAV

SEQ ID NO: 37389 - protein, 8 aa, Homo sapiens
FLRLVLGL

SEQ ID NO: 37390 - protein, 66 aa, Homo sapiens
MEITSPDLAFLSLFLFSPLPSDDWRVKGNPERGGEQRFEKMQECVWRRVKLPFKLWPPGTRCSAAG

SEQ ID NO: 37391 - protein, 52 aa, Homo sapiens
MRFLISIICTWRFIQERITGADLNHGAHKWGGCSSGHGKNFLLQLETAFCVG

SEQ ID NO: 37392 - protein, 9 aa, Homo sapiens
MAVFALVLV

SEQ ID NO: 37393 - protein, 38 aa, Homo sapiens
MDEKMLVLWVVALSGISTLFFAADHLVVCECTYRFGRE

SEQ ID NO: 37394 - protein, 42 aa, Homo sapiens
MESRTLLLLFSGAVALIQTWADYNYNQGRNDLIFTLQLWKRQ

SEQ ID NO: 37395 - protein, 42 aa, Homo sapiens
MPAENSSGGGHRHLRDAERVRASLGVSMVLPLACSISTSSPA

SEQ ID NO: 37396 - protein, 71 aa, Homo sapiens
MSGALTLYISPNLCVLCLIFCLGWSRSQEEADPCWLWENAEFIAWHKCKGPSPPCEFWSLMITYMCLVLSV

SEQ ID NO: 37397 - protein, 99 aa, Homo sapiens
YWSLVFFHLFSLISFACTLPGCWRLEAVTQQQREATLERPHIATSPSAARPPRAQEARNLWHPSLKGEDGNPAEALLGWGLHDRAGLIKWRPTRGSNPG

SEQ ID NO: 37398 - protein, 103 aa, Homo sapiens
MYCLIPEHGRKAGSLLGMLFSGGQAKLWGTASESLCSQSAADTCRQSPLLQDVPLHGELPEAEKGATDLKAAQRRVLPKAQGDRCLVSAGVYSKPKGSPVSKW

SEQ ID NO: 37399 - protein, 21 aa, Homo sapiens
IWNFPVKRPPTTLLLSLCTCV

SEQ ID NO: 37400 - protein, 53 aa, Homo sapiens
MLLLVAAASGAGGAAAKMEEPSRRCCRRCRRRCCRRRPRSRSSSRSGDAVLSA

SEQ ID NO: 37401 - protein, 29 aa, Homo sapiens
MSRAAAATAAAATWGRAAAAAAAAGTRGQ

SEQ ID NO: 37402 - protein, 31 aa, Homo sapiens
MKGHNLGLTLAAQMATCAFSAASPGEKAMRA

SEQ ID NO: 37403 - protein, 35 aa, Homo sapiens
MEPAVRMRGAEDQKTQGVNGACHPWSFSRISGLSA

SEQ ID NO: 37404 - protein, 36 aa, Homo sapiens
MELKRLGSVLRWDFFPCSRVQPQVSGPLVWEVVESV

SEQ ID NO: 37405 - protein, 37 aa, Homo sapiens
MCARFRKAAHSRFLGVSAAVGSWGQGPGCWGVGRGSR

SEQ ID NO: 37406 - protein, 40 aa, Homo sapiens
MGHGMRRRPQQAPAAPAPAPGPAAAAAAPALPPPGEALQP

SEQ ID NO: 37407 - protein, 41 aa, Homo sapiens
MSSSWEDGRCLRQWVAESETKSHKPWETESLVFVLGTVPSE

SEQ ID NO: 37408 - protein, 54 aa, Homo sapiens
MYCLIPEHGRKAGSLLGMLFSGGQAKLWGTASESLCSQSAADTCRQSPLLQIIL

SEQ ID NO: 37409 - protein, 68 aa, Homo sapiens
MSPGRNVPPQIMLFISLGGSAARQHQAPGGRCARSPALPSSPCAAAAATPGLGVAPASVPGQGSFHED

SEQ ID NO: 37410 - protein, 89 aa, Homo sapiens
MTLSTSNLKSFTSYLVSDLSWYPFPTPLDNPSQFLMLIEELWLQGTFQDFTPTQISFFSFCLLCLWDILSPHPQSLTAGPPSSASHTTY

SEQ ID NO: 37411 - protein, 92 aa, Homo sapiens
MAGLFVFAVCFSCWVLPQGQYGRRCHMYIMAFVTWTSWRACRIVKDGGFCRLVPRRAGEKVGWTVLDCCITQPIRNGGGIDHSQLEQKMELD

SEQ ID NO: 37412 - protein, 145 aa, Homo sapiens
MEAQSCEQETTARRNGGARSLKGNAAGGVVKDNICFGATSGAVTKKPSTLRKKEKFGYRETPCSKCCDSKTAGFAPLAKEPTETPGAATAKPALEGLGWRKPRTETRKLCTARLAVDTNRKVSRLLSGRKRGSKPATQWREPRSH

SEQ ID NO: 37413 - protein, 18 aa, Homo sapiens
MAAPSNKTELAWSPRLAA

SEQ ID NO: 37414 - protein, 9 aa, Homo sapiens
MKLAAFLLL

SEQ ID NO: 37415 - protein, 10 aa, Homo sapiens
MAAWLAFIFC

SEQ ID NO: 37416 - protein, 34 aa, Homo sapiens
MRPAAVAPASAGAAAAEAAAEAAATAAPPPADLD

SEQ ID NO: 37417 - protein, 10 aa, Homo sapiens
MVESNLPGPA

SEQ ID NO: 37418 - protein, 13 aa, Homo sapiens
MTAALTSISTATS

SEQ ID NO: 37419 - protein, 14 aa, Homo sapiens
MPGSPGDTKPALGN

SEQ ID NO: 37420 - protein, 15 aa, Homo sapiens
MARFSPKPSDLEPMD

SEQ ID NO: 37421 - protein, 17 aa, Homo sapiens
RIFTLRKGIPRLIFFLL

SEQ ID NO: 37422 - protein, 22 aa, Homo sapiens
RISAGLAVTLSPSGLTGSEGHA

SEQ ID NO: 37423 - protein, 23 aa, Homo sapiens
MMFSILMEVLICIPAPGNVFIHG

SEQ ID NO: 37424 - protein, 25 aa, Homo sapiens
MSLALSRGLLLLLPHQSGWCCGRRA

SEQ ID NO: 37425 - protein, 26 aa, Homo sapiens
MILRPPQPCATACLLLWAQCLPRSME

SEQ ID NO: 37426 - protein, 74 aa, Homo sapiens [sequence omitted]

SEQ ID NO: 37427 - protein, 28 aa, Homo sapiens
MLHGPWFVTIVFLMASRWNRETWSPWPV

SEQ ID NO: 37428 - protein, 29 aa, Homo sapiens
MLLAAPASSPSSRAACWGFVVARTPRATP

SEQ ID NO: 37429 - protein, 29 aa, Homo sapiens
PVVGLLAALTLNLSVRGEGICRCGFWSCS

SEQ ID NO: 37430 - protein, 29 aa, Homo sapiens
MSGAGMSGCFGWRGSHFQSFFSLVIPALP

SEQ ID NO: 37431 - protein, 29 aa, Homo sapiens
KLISARLFATFASCFRCVCCVLLRAPQSP

SEQ ID NO: 37432 - protein, 30 aa, Homo sapiens
RRRRGSHRLAPALWTLSRSGAETAAARELF

SEQ ID NO: 37433 - protein, 30 aa, Homo sapiens
ARAAGSWVFFSAICSRRRLLLLPLLLPLPP

SEQ ID NO: 37434 - protein, 30 aa, Homo sapiens
MAGSDSLLSGVFLVFLDLEVVPCGYLHGRR

SEQ ID NO: 37435 - protein, 33 aa, Homo sapiens
GVRLKTCWRGVTSLLLSLSSSSAPRFRGCPSAL

SEQ ID NO: 37436 - protein, 35 aa, Homo sapiens
MFLRPNPGFGMSVRAVEQRVCNMVSLCHPGWNALA

SEQ ID NO: 37437 - protein, 35 aa, Homo sapiens
MMRPCLGRCSRRRRRRRPGGAAAPGDPARASDPIT

SEQ ID NO: 37438 - protein, 35 aa, Homo sapiens
MGNSRGAAAWGLKGAASATAMAAGSSRRLQLLLAQ

SEQ ID NO: 37439 - protein, 35 aa, Homo sapiens
AGESWRGRWPRGARLVAGPALQPLAARVCSLLVLG

SEQ ID NO: 37440 - protein, 36 aa, Homo sapiens
MDGAWSLGHYLAVVGGGDRAVRGWPAAGACPAGLED

SEQ ID NO: 37441 - protein, 36 aa, Homo sapiens
PAFARFRSSSSPLLPLLLLLRLLAEAGGSSGGGGGG

SEQ ID NO: 37442 - protein, 36 aa, Homo sapiens
EEKHIFSFACIIRVSTPLLSFLATLLQSSTNYPCPG

SEQ ID NO: 37443 - protein, 38 aa, Homo sapiens
VAPQVQLVSVLFLFQAPSNGGLQASGPLTILEVKISSG

SEQ ID NO: 37444 - protein, 39 aa, Homo sapiens
YKKGNNPFLFLLPSPTQTLLISLLGWPPTIGPGAETRSF

SEQ ID NO: 37445 - protein, 42 aa, Homo sapiens
RRAVPASTVSGVVAAAVAEDYGDKDEGRSPSSLRAAPLRSAG

SEQ ID NO: 37446 - protein, 44 aa, Homo sapiens
RFALPALGIPLFPSASAALPFSGAQLWSFHPARQRGEGARAASG

SEQ ID NO: 37447 - protein, 45 aa, Homo sapiens
MTVSLFLLLATSQSQDGCCDSGSCPNSRQQEGHGAAPASSCLPIP

SEQ ID NO: 37448 - protein, 45 aa, Homo sapiens
LSDSTKAFFPCYLCRYFIFLAFLEITTSCGSVSGNFTDLSPPSHK

SEQ ID NO: 37449 - protein, 46 aa, Homo sapiens [sequence omitted]

SEQ ID NO: 37450 - protein, 47 aa, Homo sapiens
MHLLLLPVIFLPWVLPQHKHTSATPGFSSEKQFMSETENQTANVKFY

SEQ ID NO: 37451 - protein, 48 aa, Homo sapiens
MKTQSWLLHSLFFFPSPDFSKSTAQRRRQQNPILVQLLRTLHFPRRKN

SEQ ID NO: 37452 - protein, 49 aa, Homo sapiens
WVWPAALVSAVSCALHAGSALQGLLSAQRTPAARGRRGPELPPAAVFTH

SEQ ID NO: 37453 - protein, 51 aa, Homo sapiens
GKLVAAAAVVFSWCPAETAAAQGVAGPTQDLPGPSALRDKGPALAKADGQE

SEQ ID NO: 37454 - protein, 51 aa, Homo sapiens
YPKPGEGESVLEVTGAAATAAAAAVAALSAVAAEAAARPRAAQRTITGLGT

SEQ ID NO: 37455 - protein, 17 aa, Homo sapiens
FCLFSRELRPLVLVIFV

SEQ ID NO: 37456 - protein, 53 aa, Homo sapiens
MSLPRGRPGSLSSLWPLPSARADEVRVALGRSAWHAQRRRAGGLGCHRVREEI

SEQ ID NO: 37457 - protein, 55 aa, Homo sapiens
MGTRARPGSRCRRTAPSLALCARSHPVTLPAPRALPPELLLLLWLLSPPPRVARC

SEQ ID NO: 37458 - protein, 17 aa, Homo sapiens
MRRAWRPRLLGAALVAH

SEQ ID NO: 37459 - protein, 56 aa, Homo sapiens
SQPAPALLLGTARSGPSSTSPFPIPVVAAVLQPPAELTRVWGLAPLAPFGFSYCLH

SEQ ID NO: 37460 - protein, 57 aa, Homo sapiens
GDKHSAAVAAAALLRVLSLCRRCPAHWPPPSLVERGCQRGSLSPAPRGPQRAPQRAP

SEQ ID NO: 37461 - protein, 57 aa, Homo sapiens [sequence omitted]

SEQ ID NO: 37462 - protein, 58 aa, Homo sapiens
LEALPFIGLLSGGRPTARSFFSALVRFLFGFLPASGATRVARQQPLGDLVLGSCPAWG

SEQ ID NO: 37463 - protein, 58 aa, Homo sapiens [sequence omitted]

SEQ ID NO: 37464 - protein, 59 aa, Homo sapiens
KRAGGGCGAAGAATAAAAACWLPRLPGGDCWKLQGTAAVLCHIVSSPAGPSPPGRADEL

SEQ ID NO: 37465 - protein, 59 aa, Homo sapiens
LLLVLSLCFWFASFGPWGPGKTRHRIARTQSSSPRLLSPQQLGFRGECPARWLHRPWRS

SEQ ID NO: 37466 - protein, 60 aa, Homo sapiens
MLPCNTPSKWPSQHASKQASSVPLDPHLLRPAAYKKDYILRPYPLKFFPHPKQKISGSKV

SEQ ID NO: 37467 - protein, 60 aa, Homo sapiens [sequence omitted]

SEQ ID NO: 37468 - protein, 61 aa, Homo sapiens
MFKIQPKIVLCCCMSHTVVRSCEIATCAKRNVSVTCPRNTAEAEREDVLIYHYRYMKALFI

SEQ ID NO: 37469 - protein, 62 aa, Homo sapiens
EQPDQVPLAVLPGSLILALVYFQNQGSGPYGIAQVAAQAQYLRTGPSPFPLWDLSSGPSLLR

SEQ ID NO: 37470 - protein, 63 aa, Homo sapiens
MASYVAIRQSCCSWFFSLFSSAKSKSSRVQKQHSCLKARKSLQKQNKKTWTDTPLRNRQKKRN

SEQ ID NO: 37471 - protein, 64 aa, Homo sapiens
MAAWDRSQPLRPLPEEPRPVCYTQLIGSSITERKGNMRMTSVTNMAFWTGSIVCLASTQGMLMV

SEQ ID NO: 37472 - protein, 65 aa, Homo sapiens
MATVGHLDHLEWPLPRCWLQPGGSAHAVSFTEPEGAGTSRSPAPSKLAGGSSPGIAAAAQVMAAG

SEQ ID NO: 37473 - protein, 66 aa, Homo sapiens [sequence omitted]

SEQ ID NO: 37474 - protein, 71 aa, Homo sapiens
PPPTPLHVRVSLGSVHLARPVLGLLLLLTTTTTTGAASAVPGVSSCSGHTAPGDCSSSNQNLGLTGTLAPK

SEQ ID NO: 37475 - protein, 71 aa, Homo sapiens
MRFSTRGRPWLPSSGICKMATSSEIMGRGMARGQRSRPSSINLSIWAQNRHFWIFPSFPTPRMRLSKDVLN

SEQ ID NO: 37476 - protein, 76 aa, Homo sapiens
LRQTEALEIKRKYRRTNSLPSPGAGRGHSGDLGLLSQDCESGLGFSSLHSTAALVIATCLLITEESQVLRRGRNTH

SEQ ID NO: 37477 - protein, 79 aa, Homo sapiens
MSCGSRRGPSLASSLAWLQLQSGTRPFCSSSPPYFLSHGRRIPFSHPRKESALRATKEPRTHRTNTSLADLPSPAPAHL

SEQ ID NO: 37478 - protein, 82 aa, Homo sapiens
AGATAARRRKPKPSPGPSLRGPIRPVHPGPRSPGRGAQSCAHEPCAGRAWAWRRRVPGLRRLCGGSSLLAVGSLAGAARPGP

SEQ ID NO: 37479 - protein, 84 aa, Homo sapiens
RFFPQASGLFGALVACLPNSAASPRQEHFLPRLLKLVRGFPTSQKSFIGPPLETSDRSHRRLASGICPHPRGQVRDQRPAKPSP

SEQ ID NO: 37480 - protein, 88 aa, Homo sapiens
RRGGLRVGLDARAAAQRLNRCGPPRPPLPTLASAVSSLASPTFLLLCCLRFWSSAVLAARPEESPRPPRSRFPLARSRRDFGTVSPSG

SEQ ID NO: 37481 - protein, 90 aa, Homo sapiens
GVSIRPLSLGRCWGRWQLQTRGLALLTAVCSTGVPRGTCSQQVAQAVTQLRRCEWRGHRGGQGRGRRGARGSSAGDNLRAFVDNCLYAKH

SEQ ID NO: 37482 - protein, 95 aa, Homo sapiens
ACACAALASSRTPPLTLQGGSGLFVLRPGQDRARRPRRVLGASACLAAALAACHSVLARSPHRAEAAGWGGSGASTRFPAAGKPLDAPRGRATSG

SEQ ID NO: 37483 - protein, 95 aa, Homo sapiens
MSHSYKKAISDEALRPFQMDYFGGLPPGQYATRMTGQVHGSGCHLRSAPCDLGASQRKLSSNFSEIDAGLFSQGKSAAYTDIGATKPVEQRETAS

SEQ ID NO: 37484 - protein, 97 aa, Homo sapiens
LGSCGRGHREALGCAWLLLVGALSRRPAWGGGGVDSSPASPWRGGLHSLLRPPPLGPQRLGPASCFPACRRSRWLEEVFTSQESQSVSGPRWEKNWL

SEQ ID NO: 37485 - protein, 35 aa, Homo sapiens
MAALPPLLGSVGSWGARSGPEPELASRAETCAPRL

SEQ ID NO: 37486 - protein, 102 aa, Homo sapiens
ARGFSALSPRRIPGVDLLAASLCLPSCAPFPASRCCWRALAGFFLPRPRDGGECGTEEPGLPTRWARAPKGPLGSERGGSPRGPRPSLASDCATLRSGLTGG

SEQ ID NO: 37487 - protein, 106 aa, Homo sapiens [sequence omitted]

SEQ ID NO: 37488 - protein, 106 aa, Homo sapiens [sequence omitted]

SEQ ID NO: 37489 - protein, 108 aa, Homo sapiens
MGRSALDRTTAQPEASGTPAAAQSPPGPWRPSGTGRCLLCSNPSGAPCPLSLPRRALPCEDYTRCFSSLPEDTASLGPLPCAKTPMTSVPNAVPSAVLWGAALSDFPG

SEQ ID NO: 37490 - protein, 117 aa, Homo sapiens
LGRASASALGLPAACSGSSGRGLAWPGAHPGGCSPCLTCGGVTGPGPAPVHLRGLHPPAAGCPALCAEALPCPAGRRAGLGLAAASGDGGCGLPPSSARLRWGPPPGLPAGTGIHGP

SEQ ID NO: 37491 - protein, 126 aa, Homo sapiens
PPAAAAAAAAATATATATATAVAAGFVGSAAEQEPELWPELWPESQGAGRLIPEVGAEDRRARTRGHRPLPLLRLRERALGASEAAAAGAGQRGRPLAATPPSPALPGPAPSPARAWSDRERRRRG

SEQ ID NO: 37492 - protein, 149 aa, Homo sapiens
KQLSVLDQSLNFSFYCFLAAAAGTVAAGSGSAGLRVGLRGRCSSPALGCPTARRRTTHGARATGTSKAPSVGRGEGGGGTAEANERTPRRRVPVSPRCNAFQQKPPRPGLQQPDGCQGHTAATGAAVAVAVPHGLRTPRVANEVIEKKQ

SEQ ID NO: 37493 - protein, 15 aa, Homo sapiens
MRSPRSSSLFGVSGD

SEQ ID NO: 37494 - protein, 58 aa, Homo sapiens
MAAALRRPVSSSPPSSAPPLAASSSRVSSSSFAASSSSCSSTSDRRSAGSLTRSSGGG

SEQ ID NO: 37495 - protein, 81 aa, Homo sapiens
EVRRRRGLELRRGLGRRAAAGGGGHVATAVAARAAAATAAAASARAAGRPPTLPPRGSPSSLHLAPLVPLARPGAALCFSL

SEQ ID NO: 37496 - protein, 20 aa, Homo sapiens
LLYLIHKILVCIFLNTVHVP

SEQ ID NO: 37497 - protein, 53 aa, Homo sapiens
IATVSIAAAVAPLTLFLYRGDGGLSSRRRADAAAGAFQLMWRSRCEATYKSIY

SEQ ID NO: 37498 - protein, 34 aa, Homo sapiens
LFMAVPGSPTFFPAVVLNLSKAEAVELEVLAGVK

SEQ ID NO: 37499 - protein, 28 aa, Homo sapiens
LGFCLVLSLQKVLPVPPALGTRLCIASP

SEQ ID NO: 37500 - protein, 12 aa, Homo sapiens
KVHVLLMLTLID

SEQ ID NO: 37501 - protein, 29 aa, Homo sapiens
LAAGFLLSFWAAMSAGPAQQLRAHGGPRC

SEQ ID NO: 37502 - protein, 29 aa, Homo sapiens
ILKAPGLTGFFVLSTGFCFTTGHKHVRQK

SEQ ID NO: 37503 - protein, 23 aa, Homo sapiens
LRLRLRLRRLRFPMGLACGAWAL

SEQ ID NO: 37504 - protein, 16 aa, Homo sapiens
MLAFILITDVILCILL

SEQ ID NO: 37505 - protein, 9 aa, Homo sapiens
MRVGLLLSL

SEQ ID NO: 37506 - protein, 23 aa, Homo sapiens
VRRRSRWWDLTVGPISLFSALLA

SEQ ID NO: 37507 - protein, 33 aa, Homo sapiens
ISNSCLLVLSLKKILQSLLILFLGVTIFEAKLT

SEQ ID NO: 37508 - protein, 23 aa, Homo sapiens
VIPSCAVVLWSSVLLSPSAFSPT

SEQ ID NO: 37509 - protein, 9 aa, Homo sapiens
RPLVLVIFV

SEQ ID NO: 37510 - protein, 7 aa, Homo sapiens
LVLVIFV

SEQ ID NO: 37511 - protein, 98 aa, Homo sapiens
KISTSLHFSFLWGAALVLFGPCLLGMEQSIEQTTEILLCLSPVEVASLKEGINFFRNKSTGKDYVLYKNKSRLRACKNMCKHQGGLFIKDIEDLAGSC

SEQ ID NO: 37512 - protein, 20 aa, Homo sapiens
MSSMNMHRYLSSMEKITYKI

SEQ ID NO: 37513 - protein, 53 aa, Homo sapiens
LSLSSSLPNFCPCPGLSPPLSLPWSLPVSVPVLVSLRLCSCLGLSLSLSPASA

SEQ ID NO: 37514 - protein, 56 aa, Homo sapiens
LSDLSPPLLPLSSPPSSLLSSFLSPLSPFALLSSLSILFFLCLSSNQSVAVKDTSH

SEQ ID NO: 37515 - protein, 43 aa, Homo sapiens
LPSPTPSHPQLNLIIIPILFLTLHQLNPNSMPYPSPNPNPTHL

SEQ ID NO: 37516 - protein, 67 aa, Homo sapiens
LVSVSLAISLSLKISAPVSMSLSLCAPRIFRAPTPVPRGPRLGAGPPTSAETQSVERSPPSPHPQPL

SEQ ID NO: 37517 - protein, 12 aa, Homo sapiens
LLWFFLGVMKFH

SEQ ID NO: 37518 - protein, 34 aa, Homo sapiens
LCSLTGSVCVMCVGCVCVGVFVCVSTPVCVCVTP

SEQ ID NO: 37519 - protein, 21 aa, Homo sapiens
VGFGLSLSVGLGMFLNLTWWS

SEQ ID NO: 37520 - protein, 44 aa, Homo sapiens
LPALPSPKMAARSPARASQATLPHCARALFSFPFLDQGAAIRSL

SEQ ID NO: 37521 - protein, 56 aa, Homo sapiens
MSASRNLRTLKGRTAPGSTLPLRRRPPPHSRCLMSTFSRWLRSPCQCLPRSLHTQT

SEQ ID NO: 37522 - protein, 64 aa, Homo sapiens
LLEGQGCGFWGLVFSSGAFIPLPLPSFQTPLGRVQWLMLVIPALWEAKAGGSFEARRSIPAWAT

SEQ ID NO: 37523 - protein, 22 aa, Homo sapiens
LSLLITSLAYFWISFPPFSSKS

SEQ ID NO: 37524 - protein, 138 aa, Homo sapiens
VRKHYFSKRSFLPCSLLQPLAQPLRPLPVNDAMEGVLGSPCVPCIGASQPPGPLLWGSRHPHATNRRQGRPLSPVHLLGRTRGCGTEEVQVIPGDRDRAGRRQDPLGKHGEGRSPGNGPAAHHPLRARGGLEVGSQHL

SEQ ID NO: 37525 - protein, 44 aa, Homo sapiens
VAVLLIAWVVVGVSLQRRILTVKKQSGSRGPPLIPQGPDGGQRG

SEQ ID NO: 37526 - protein, 88 aa, Homo sapiens
VSKPRIMQPPAFEFLVSLALVSTCMMGFSGPGFDQRTLCHHRFFLSLSYLGELMTPGPCSTRMSPRSCQLGSASMNASNFVEARVPCS

SEQ ID NO: 37527 - protein, 87 aa, Homo sapiens
VSKPRIMPPAFEFLVSLALVSTCMMGFSGPGFDQRTLCHHRFFLSLSYLGELMTPGPCSTRMSPRSCQLGSASMNASNFVEARVPCS

SEQ ID NO: 37528 - protein, 43 aa, Homo sapiens
LGVLPLLLLVLNLVYSLLIKCTTLDTVQDDATSSWMLICHVDF

SEQ ID NO: 37529 - protein, 32 aa, Homo sapiens
LDRRGTSTSILLLLSPASPAAPNRPVKMAAAG

SEQ ID NO: 37530 - protein, 36 aa, Homo sapiens
MCRARRGWSPPLLPPPARPAFDPMGHRQGRVIAARP

SEQ ID NO: 37531 - protein, 118 aa, Homo sapiens
MRYPEGARSSTFPVPSQTQRSPFLEILIEVPALPVLMPDQQDASPGGHPGYQDWERMPSGDSCIVLGGVLGPGSGVGGSVSGRGWKLEGSIFSDRTSWPCTWTVTWGGAPTIRSPTRE

SEQ ID NO: 37532 - protein, 131 aa, Homo sapiens
LPSLSISSSPFPFSPPPPLPASSPHPSWRAGCAEARELAGEGRMEGPGLPAPLVGVLLAGACVFSAAGRVPAEPRGDSRLWQRALGALLSPPLKGWGQPFPDLNFFCSLFLTLHLRVCSEVVVGGERRRSV

SEQ ID NO: 37533 - protein, 29 aa, Homo sapiens
LRQWKTINFTSLAYNLVVIETALLFLSLF

SEQ ID NO: 37534 - protein, 29 aa, Homo sapiens
MNAGYLCVWYLLCPFLFKDPEQNKDTLSI

SEQ ID NO: 37535 - protein, 72 aa, Homo sapiens
LPTKTIRVKKSPLHPRTRKPPGWHKRPNSWEPSTVQGAWGRRPEAGDTEESGGYYGSGNVECNVSSSAHLCY

SEQ ID NO: 37536 - protein, 13 aa, Homo sapiens
LLCISFLLMCGAS

SEQ ID NO: 37537 - protein, 24 aa, Homo sapiens
VIWAFICVRSRFILFLTVFSSTSG

SEQ ID NO: 37538 - protein, 53 aa, Homo sapiens
LAGGPRRRRAADGRTDGRLHLAPSLAAGFLLSFWAAMSAGPAQQLRAHGGPRC

SEQ ID NO: 37539 - protein, 27 aa, Homo sapiens
MLFLVSLGIVLAVERKASVTSRNSPII

SEQ ID NO: 37540 - protein, 13 aa, Homo sapiens
MLPCNFSFFCLFV

SEQ ID NO: 37541 - protein, 38 aa, Homo sapiens
MVRSHEKNANTLRWPHIFTLALVFGVIFCYPVLKLFFS

SEQ ID NO: 37542 - protein, 42 aa, Homo sapiens
LAASEPKAESGRQRSPRRRPLEDSASSERWGLVMLTRLVLNT

SEQ ID NO: 37543 - protein, 71 aa, Homo sapiens [sequence omitted]

SEQ ID NO: 37544 - protein, 17 aa, Homo sapiens
LYLLCSLMPAWTILEAV

SEQ ID NO: 37545 - protein, 19 aa, Homo sapiens
LTCMIMEMVYLMLKMSLVF

SEQ ID NO: 37546 - protein, 45 aa, Homo sapiens
MQPLQRHMFEIPGHWRSSRLLYSPQIKNEKRIHNLVIASSESSEL

SEQ ID NO: 37547 - protein, 56 aa, Homo sapiens
LSSWMRFLISIICTWRFIQERITGADLNHGAHKWGGCSSGHGKNFLLQLETAFCVG

SEQ ID NO: 37548 - protein, 17 aa, Homo sapiens
LLLLLLLVAPLQMYCCP

SEQ ID NO: 37549 - protein, 51 aa, Homo sapiens
LQKTFLSHIFLLLISQQLKFQLMDSILPVKTSSPENCASWHPAVPKYYLTH

SEQ ID NO: 37550 - protein, 30 aa, Homo sapiens
IFFFFCIIVSSLPTAELGTENACSTCLLNE

SEQ ID NO: 37551 - protein, 8 aa, Homo sapiens
LLIVLLFA

SEQ ID NO: 37552 - protein, 73 aa, Homo sapiens
MSRTPEFGTSSPTTLRRLSCRAALCTLSWISQTPIPSQLSPAVRCCHRARTSKMCSPGTSTAASSATWSMSSS

SEQ ID NO: 37553 - protein, 93 aa, Homo sapiens
MPPGFQLLPSKFKAWEMWPSRTKIIPCGDRAKMNPEGSLGGRLDLPTSEGRDFPLRRSLRRYAWKDFNARITALGPLVRISSDLRMLHRKEDI

SEQ ID NO: 37554 - protein, 24 aa, Homo sapiens
LLLLSFLISDWPPPTGSAEHKYSG

SEQ ID NO: 37555 - protein, 8 aa, Homo sapiens
KLAAFLLL

SEQ ID NO: 37556 - protein, 10 aa, Homo sapiens
LSRLNMLWLL

SEQ ID NO: 37557 - protein, 10 aa, Homo sapiens
KMAVFALVLV

SEQ ID NO: 37558 - protein, 76 aa, Homo sapiens
LCKQSLVYSCLHQSTVRFMKKNKLRTTLYVHLQMPQLMLVGCLSAFCDNEHMDFCLLNSVDPFSQLPGAWIFTSNC

SEQ ID NO: 37559 - protein, 93 aa, Homo sapiens
TAAAAGPMAPTTRRAVSFGLMAPAPSGVAAGLGVARWSAHLPAVGWVKCVASCHPASTAASPSAQLSARRGVTPITSLWMGTDSISKAPASTC

SEQ ID NO: 37560 - protein, 93 aa, Homo sapiens; identical to SEQ ID NO: 37559

SEQ ID NO: 37561 - protein, 73 aa, Homo sapiens
TPSPAETALSELGCFGFSLRASPTYLPASSRPRPSMRSRSWFAPFFLPQMALAPCPLSWTGCDPPGDAPFRGA

SEQ ID NO: 37562 - protein, 22 aa, Homo sapiens
VLAGSWSSVFTPIQLLTLAFVP

SEQ ID NO: 37563 - protein, 11 aa, Homo sapiens
LSYFQKLLLVL

SEQ ID NO: 37564 - protein, 31 aa, Homo sapiens
MARGPTSLSAAIWGTVLEAGIQGQIRHRSCS

SEQ ID NO: 37565 - protein, 93 aa, Homo sapiens
MRPWYQAWLRRSSLLRSSSSSSSFFSFSGVLSMMCLSLENCNTESTMSSPCPGHTRPCQLEVTACFTNPTSYATACIQGDVATGLSSDQGAEM

SEQ ID NO: 37566 - protein, 51 aa, Homo sapiens
MSLKVWSRKPWGSLGPFQRFHELKSIFITMLSLYFLFHSRGYIMSDDIIAL

SEQ ID NO: 37567 - protein, 50 aa, Homo sapiens [sequence omitted]

SEQ ID NO: 37568 - protein, 23 aa, Homo sapiens
MNSFRTYCLGNLKPAGLDRQEEQ

SEQ ID NO: 37569 - protein, 89 aa, Homo sapiens
MHLLTSCKSGTFSAPLLLCCRREKLGMCSSGVPSPPASHCPCLPKTSSLSLLCPPPPPSAFALLSSFSPEVRAASSPLVLFLPSLCSLL

SEQ ID NO: 37570 - protein, 74 aa, Homo sapiens
MFPGAMFAGFYEAENIGSVFLRNLRFRIPGPEGQEVLCKQIKCTFRKMKSCNRKIFQNFSATDFTHNSEGRKNR

SEQ ID NO: 37571 - protein, 41 aa, Homo sapiens
MKQPLAFPRPVILLVTRNPKFLSPALPVSSVRVLVPSAELL

SEQ ID NO: 37572 - protein, 93 aa, Homo sapiens
LPQSRPAVAADSARDVCALLWARASLFCARVKRFVPAIPWAALGKLAAWPLVWLSGLVPATVYTDWLGEETRTRKSGTKTRSLRTPQRLGLRL

SEQ ID NO: 37573 - protein, 61 aa, Homo sapiens
IFILVFLLLFSSFVFFFSLETGSSYVGQAGLESPGSSDPPASASGKVGLQARIAAPGQSLF

SEQ ID NO: 37574 - protein, 57 aa, Homo sapiens
MFIYKDLACSCVCGAALVSQLSITLARVSPCGFLLLRLPGWSRPHRRARGPARSCVQ

SEQ ID NO: 37575 - protein, 55 aa, Homo sapiens
VISRVARWDASLLLIRFTIYCSGCFLIPVLLGPGSFAPCPAPRRGGWCGNGWARW

SEQ ID NO: 37576 - protein, 34 aa, Homo sapiens
TGLELQGERRRCVLLRVGRALVGAGSGAGLSALA

SEQ ID NO: 37577 - protein, 59 aa, Homo sapiens
MQLWWRPLSFLCQCLVILQRDAALHRDAHAVSHTSLHHLDCPALCILKPTACRSRHFSI

SEQ ID NO: 37578 - protein, 19 aa, Homo sapiens
LVMLLLLLLPPPPPLLLIL

SEQ ID NO: 37579 - protein, 64 aa, Homo sapiens
IHYSRLDRLLWLSLLAWCICYGKRDYNLVLFVEMTTLIKSTHCWSQHTWKVLQGLSYRKPRDRK

SEQ ID NO: 37580 - protein, 16 aa, Homo sapiens
IPLVQFSMFLCVLHLL

SEQ ID NO: 37581 - protein, 15 aa, Homo sapiens
RLAKSSLLWMFFMML

SEQ ID NO: 37582 - protein, 11 aa, Homo sapiens
IFFFSLSVWLC

SEQ ID NO: 37583 - protein, 28 aa, Homo sapiens
TIFALFVTFYSNHLFFCGNWHCPNFYPL

SEQ ID NO: 37584 - protein, 58 aa, Homo sapiens
VCMWVQPWEHCGSASQEPWRSRSLKTQWWHWWAPMPPCAAPSPLSLASAWHSSTSSGS

SEQ ID NO: 37585 - protein, 31 aa, Homo sapiens
VGRFWALWLGFCNFSLGTAVEPHPLWIIIAT

SEQ ID NO: 37586 - protein, 12 aa, Homo sapiens
MGIPPVLLLLFS

SEQ ID NO: 37587 - protein, 81 aa, Homo sapiens
LREQARPGSLAAAWLQHARPPGAAAAAAPLAARRALLLFSLVLAAVLRLCGARHSEHLPLHDASPRHSDPGQRENNRCSGL

SEQ ID NO: 37588 - protein, 73 aa, Homo sapiens [sequence omitted]

SEQ ID NO: 37589 - protein, 41 aa, Homo sapiens
MSAVAKISSTSTTCSGLPPSSTLLACSWASSLPLSLEALRT

SEQ ID NO: 37590 - protein, 41 aa, Homo sapiens
MCHQYLLYILQALLSYFTSFTCLTWLDANTLDEFERTMLPF

SEQ ID NO: 37591 - protein, 29 aa, Homo sapiens
ILNAISSLLALGHFLLDPALLSAIVKDQP

SEQ ID NO: 37592 - protein, 43 aa, Homo sapiens
LRALPAGLCAASGAAAALGAPLGAGGDREARVKGATGTLARYG

SEQ ID NO: 37593 - protein, 91 aa, Homo sapiens
TGGALLLVPLSQSSPSPEVTAHPEWKSRRPTTQPPGRPWWHRTTSTTSRGPRTGCLRCRRSNKPAWRIFQEEDISITLNLLLKKLYKNKLR

SEQ ID NO: 37594 - protein, 60 aa, Homo sapiens
VACSRLTTTSVLWAQAVLASQPPKELGPQHQQQQLVIGGDRIFSCTSPHQCTANGLYPVL

SEQ ID NO: 37595 - protein, 30 aa, Homo sapiens
LLGVLPVSLLTVFGVASRIQRRPIVTPRSS

SEQ ID NO: 37596 - protein, 25 aa, Homo sapiens
LGSLSGGWVLLVPAVPASKNHWVCR

SEQ ID NO: 37597 - protein, 37 aa, Homo sapiens
LSGAQRFGRLIDHGARVLLVAAAAAAGARLCDHARTL

SEQ ID NO: 37598 - protein, 77 aa, Homo sapiens
LFETVMTFLLISLLVSFSGRAGCLEFSVKETQDSPLFLCLWESPWHTPKRGPCSVSQGSFCIFGLASYICHVVSSSA

SEQ ID NO: 37599 - protein, 63 aa, Homo sapiens
VGPLIFLDRRGDHEVEQWALPSDTSVVLLGVGLAVVVSLTLTAVILVLTRRCRTASHPVSASE

SEQ ID NO: 37600 - protein, 72 aa, Homo sapiens
LFCFSFWLFILVATIRKSNTNSNCFLLFTFASLLVELWQVLISNTEHDLPPANVEPGIAASPDSSFIHSDSP

SEQ ID NO: 37601 - protein, 38 aa, Homo sapiens
LGPGLLLSLPSIGAQHPLPAHPSDSNSSPAPRPCVHFS

SEQ ID NO: 37602 - protein, 26 aa, Homo sapiens
MSLVICLLLKVTSRASSWHCFWNTVT

SEQ ID NO: 37603 - protein, 50 aa, Homo sapiens
TPLEPRLPGVVPAAAAAQAASALLCAGPLTPPGPSPSAGRDPGGDHESDR

SEQ ID NO: 37604 - protein, 39 aa, Homo sapiens
MRLTACGSWSCVRSVRSLSPRKPWRSTASLSTSRLMDLA

SEQ ID NO: 37605 - protein, 21 aa, Homo sapiens
VNVKCKILVMCFLFLFSCELN

SEQ ID NO: 37606 - protein, 36 aa, Homo sapiens
LPPSPTLGAYLLLWACPASLCTQCLARATGQCWGCH

SEQ ID NO: 37607 - protein, 130 aa, Homo sapiens
LGAPRSQVGVFLLGTPQYVLSSLTSGAPLCFPLVCPLSLSLLVLSQVSEHPHFSGSGSPALLSLPLCAPTSVSVVSPLCASCAEGPPLSLLLCLGPLAPPCFFSPSPLSPLLSAPCLPLPFSVFAGSLGL

SEQ ID NO: 37608 - protein, 39 aa, Homo sapiens
MTSGRKMCCAMSPSLWRDSGSALTGPCWRHAAVTSTQES

SEQ ID NO: 37609 - protein, 80 aa, Homo sapiens
MILGFPASRTAFSIFCSLPPVRSLKMKANTTQRLRCQYVLQAALLLGPSYSPASAFQEAETTRTQDCTWLANTIANKKIL

SEQ ID NO: 37610 - protein, 21 aa, Homo sapiens
LLPCIHLFSFLELGLALLPLT

SEQ ID NO: 37611 - protein, 84 aa, Homo sapiens
LDTAGASCLPALALAFPKCTASSAASAASACSPRSWMKWRRDIRSPWLSSTRSCRASERQPSLLLGRLSLSRASSPTQALSSFH

SEQ ID NO: 37612 - protein, 23 aa, Homo sapiens
MGAASQMPLTASSVPTSSTALPI

SEQ ID NO: 37613 - protein, 19 aa, Homo sapiens
IMTFGFVLSSSLLLSQGRS

SEQ ID NO: 37614 - protein, 27 aa, Homo sapiens
VFLTWGLRLVSACICLILAVAFLDLRM

SEQ ID NO: 37615 - protein, 26 aa, Homo sapiens
MFIILSYSVITLPWHYNVSSTEVLCS

SEQ ID NO: 37616 - protein, 15 aa, Homo sapiens
MLLPGLISIFRFFFF

SEQ ID NO: 37617 - protein, 43 aa, Homo sapiens
ILPNEPHQLLQFLIFPHQPLYLMPKPFIIAGLGLLRGRHRSPG

SEQ ID NO: 37618 - protein, 38 aa, Homo sapiens
VVSSSALFLLYFIHNSQRCWTRMGRPPVAMSPPRCSWG

SEQ ID NO: 37619 - protein, 28 aa, Homo sapiens
LISYYCWGCHLLLQTLSADLSPGPSAEA

SEQ ID NO: 37620 - protein, 32 aa, Homo sapiens
LLHVAFLLLGFCFCSELSCYLFRADVTCRWRV

SEQ ID NO: 37621 - protein, 55 aa, Homo sapiens
LKLSFSTLLILCFCWSAYHLMASKTNAKFLSDYAVLRDYLKLHSKARYTTNFEME

SEQ ID NO: 37622 - protein, 77 aa, Homo sapiens [sequence omitted]

SEQ ID NO: 37623 - protein, 24 aa, Homo sapiens
MLVSCLCAALQMWRAGAWELWGRR

SEQ ID NO: 37624 - protein, 63 aa, Homo sapiens
LGSAGSMCVSQVAGPTGAVRSPPDSVPAPLLAICDLGPVILLSLASLIFKMWLMPALGNRCED

SEQ ID NO: 37625 - protein, 42 aa, Homo sapiens
LFGQKSKPHLATLAWLQLGTQYLGLQAILSQGPLEILFLMVL

SEQ ID NO: 37626 - protein, 63 aa, Homo sapiens
LCLPRGRLHKPSCAGLGLPACLPAWPGPSSSLPLPLATASHPGLASLLPALGPRLCPPSPQGR

SEQ ID NO: 37627 - protein, 28 aa, Homo sapiens
LDTRARPPITELHSFLILLLILAPNKTG

SEQ ID NO: 37628 - protein, 26 aa, Homo sapiens
LDVWPVSLGKLLLIIFTVDNIGENSP

SEQ ID NO: 37629 - protein, 133 aa, Homo sapiens
MLCYIILQSQKIFCIFFCYYRKISVSLPLSLSQSVCLFYSISLCVSLLLHISLCVSVYVSLSLSSFPCFSLTHTHTHSQLSKDTSVLTFTFCFKQHTHFTLNYTSHAHELSAPSVHPTCVFTFKAAPSPRPAT

SEQ ID NO: 37630 - protein, 86 aa, Homo sapiens
MCWRKKMTFLTFPGHILLEALHLLELNDCCFPLTLLFIHQTGDAYRLSVKSQSCLGRELLAISVFPFKPDPGDSEILRALLTGSGI

SEQ ID NO: 37631 - protein, 59 aa, Homo sapiens
LGRRGDPGSGGFPTGAVRGCPQRQSPWGLWAGLGWWMWGLGLLQKLTSCCMLCRLSFHL

SEQ ID NO: 37632 - protein, 89 aa, Homo sapiens
MSLWVVTVSFLSWWCVPSGATLHFLSQAARTAQPCQCCDHGPVFGFHLLVLHKLLLSLWPRPLPRCGWFWPGRHKVAVGQDTSPVLALQ

SEQ ID NO: 37633 - protein, 46 aa, Homo sapiens
LHRLTVCLVSVIYMVLKCVYFCMSLFSLGLRGLRPELASPNTCCAW

SEQ ID NO: 37634 - protein, 97 aa, Homo sapiens
LRSSHPHIRLFSHASPQGPSVSIACLLLGSSWVQYTRTHTPVSSALCMPFRRPSWKVANRMSILGGSELTGSGQAPGKPGVWEQHPPWVPQSFQQAK

SEQ ID NO: 37635 - protein, 120 aa, Homo sapiens
MQILCNTTACFSFASFQTCHSSTYSLQATYALVAKATQSPSNTNSEEEPLPTPEVATVPSPCPCCWMWWAGSHPHAPLSGPARRLGDPEPVVAAPAAVRRGLLVPQSGRLFPSPCFPQLA

SEQ ID NO: 37636 - protein, 110 aa, Homo sapiens
LAALGWRAPFPSPFFFLCSCEMLISVSSSWFMCSGGFGVGGNADGSWGRGGYSSGYPSLESGPGRHGPTCIQKFPGVIVMVVGTGGCIRCSWKEGAGVGISWSLLSPMRL

SEQ ID NO: 37637 - protein, 57 aa, Homo sapiens
LRLCRGSSASGRLGETKSRTGNIWCYYLGLGLTVGVQMVQALSMDLYVGVVSGFGGL

SEQ ID NO: 37638 - protein, 148 aa, Homo sapiens
VESRAWVAPALGREVTPRAAMPAHEDGFTQDAFMMPARQSHQNRKMEDAFCGKIVLFEISKRALQLSSQTEFRSSSHAGVQWRNLSSPQPPPPGFKRFSCLSLLITWDYRHVPPHLANFVFLVEMGFLHVGQAGLELLTSGDPPTSAS

SEQ ID NO: 37639 - protein, 28 aa, Homo sapiens
MPNTASLFLLLALYLAFTLNSHGMPTRC

SEQ ID NO: 37640 - protein, 47 aa, Homo sapiens
MAGMRRAEALLSFTAPGFPRVPAHPDARWQMQPHLKDTACWINPSPP

SEQ ID NO: 37641 - protein, 11 aa, Homo sapiens
VEPQDRSCLDP

SEQ ID NO: 37642 - protein, 45 aa, Homo sapiens
MKRGTRQGQRMEKAPVLIKGGLLGLESSLLLVGRCKDVSREGLMN

SEQ ID NO: 37643 - protein, 118 aa, Homo sapiens [sequence omitted]

SEQ ID NO: 37644 - protein, 34 aa, Homo sapiens
LHHPCRWGLLYKLFLYMFGCGFYSLVPLPLNPTI

SEQ ID NO: 37645 - protein, 36 aa, Homo sapiens
MVVFLTLMLFCKMFVEMFICIWISVMCHFSSSIEIQ

SEQ ID NO: 37646 - protein, 141 aa, Homo sapiens
MSCDGRPVAGVTRNFPRPCGPWSVKKSVPVTRWSRLPFRISAVLSGTPTWQTPSSSNGIMGSQKVLEVVDTSKSQGAALVLGNHPVFLPGSGWRLFTLNKGWMDGWINGWMELEQRDGWRIGGTEGWTDGRMELEQRPALC

SEQ ID NO: 37647 - protein, 102 aa, Homo sapiens
MFPSVKWGTGNPPILGHRVLEEQTGVGCALRNSAPREVARLSRSLTGVCVAQPGDPRRLLHSLGCFQAQQRWFLSFGLDEGGWLSGDHLSLSPPEAESKRLH

SEQ ID NO: 37648 - protein, 95 aa, Homo sapiens
MVIPSLKSPFLQYTCMCALSLSLSLTHTHTHTHTRARARALLRTEAGGEGFALVSGTGLAGASPLHVSRFSLSVSPLPSQGLSPFHPPRGTSESE

SEQ ID NO: 37649 - protein, 30 aa, Homo sapiens
VLMGFYLGASWLHWSGTGRSWRARDGTGAN

SEQ ID NO: 37650 - protein, 94 aa, Homo sapiens [sequence omitted]

SEQ ID NO: 37651 - protein, 24 aa, Homo sapiens
MAGSSFESVIQAVEALEKNWSASA

SEQ ID NO: 37652 - protein, 223 aa, Homo sapiens
MGARRQPRAPAPGPRLRVRAQHPGKVGGRRWRKDARAVSRHGRGNCGAFAILSPSPYLRPRGRAHHPPSRLGGGRAPSWPPPSRPLNSPGDCGYCHRLASTASSRSTQMRTVGGKKGRRYSQRTAAAAPEASPKWPPPSRPPPPPLPPPLARNRYRRRGPSSRERQSPSKLQQVSSGTWASRFPWQPTSVALLRFTRGWFPDSFQTPLPSLRKLSRLRIPLRI

SEQ ID NO: 37653 - protein, 71 aa, Homo sapiens [sequence omitted]

SEQ ID NO: 37654 - protein, 60 aa, Homo sapiens
LCFEVSFRQIPGDVQVYARVHTHHTYTHTSFFTQMVAYFILVCILLFFTNISQTSVHIKT

SEQ ID NO: 37655 - protein, 7 aa, Homo sapiens
LGRAGGA

SEQ ID NO: 37656 - protein, 41 aa, Homo sapiens
LNQLKTRKRRRKRKKRKMLGNIYLTCSTARTLASCCYSCKY

SEQ ID NO: 37657 - protein, 29 aa, Homo sapiens
TPRTGPGSSSFAAAATTAATAARGGSSRA

SEQ ID NO: 37658 - protein, 24 aa, Homo sapiens
IGRAVTVVCPGAAGAAAAAGHGAR

SEQ ID NO: 37659 - protein, 52 aa, Homo sapiens
LHWHLWISVLMFVLSDLTFYFLSFLEIADCSAPSTDIYINSYSFPLPSLNSF

SEQ ID NO: 37660 - protein, 40 aa, Homo sapiens
LRLQCLMGLPVGGSVFAVPGRSGEPWEEVLRRPSLGSPQD

SEQ ID NO: 37661 - protein, 25 aa, Homo sapiens
MKKTSLIVQFIQIITSMGHFRPLDN

SEQ ID NO: 37662 - protein, 13 aa, Homo sapiens
LDLIIMCNMFIIL

SEQ ID NO: 37663 - protein, 40 aa, Homo sapiens
KIIRSDVKLASQALITTWPTPWPAPLASAARAALRPLRRS

SEQ ID NO: 37664 - protein, 36 aa, Homo sapiens [sequence omitted]

SEQ ID NO: 37665 - protein, 92 aa, Homo sapiens
TPLPASAAPQRSAPWSTSPRWARLAGAEGSGGTAGCLLALPAHNTSPSRLGSRGPLWDPGHQQLSGNNAKGVPRLLTSEQRFEKDSQAHVFS

SEQ ID NO: 37666 - protein, 44 aa, Homo sapiens
LYPESPVLNVDSIPRAGRKGTERFLSTAIAWTFLLSTPMPNCLP

SEQ ID NO: 37667 - protein, 33 aa, Homo sapiens
MYSGSRPKRNPCLLLELFMTSCSSSWSSSLFLT

SEQ ID NO: 37668 - protein, 37 aa, Homo sapiens
ILSVSLPCLLSFPFPLPVQLDPASGVPGAQHSAGQAD

SEQ ID NO: 37669 - protein, 75 aa, Homo sapiens
MWLPCIFFNFISSLAMYIHPSLSHALCRAFWFQNVPCAFLLWSSLNRMPFLPCLPVDRKILCIGELALTTIFLAC

SEQ ID NO: 37670 - protein, 19 aa, Homo sapiens
RNLLISFVTFGLLLLPHTH

SEQ ID NO: 37671 - protein, 34 aa, Homo sapiens
MAPSNLWAGITVCLVNINIPILLIIFMLGQVLGQ

SEQ ID NO: 37672 - protein, 27 aa, Homo sapiens
KIVYLPLLLLSYNAWKQEMGSAAANRT

SEQ ID NO: 37673 - protein, 63 aa, Homo sapiens
MPASTASAAPLLWPLCVPAVSRRGPWQVLSRGRGHGSTGSFSLWAGARPARGLYWGTCLRVLG

SEQ ID NO: 37674 - protein, 35 aa, Homo sapiens
IFKCNLLTYLLFMYLFKHQIFVQEFGKIEDESLIE

SEQ ID NO: 37675 - protein, 20 aa, Homo sapiens
LLHLCYLGTSVILAASTCLS

SEQ ID NO: 37676 - protein, 77 aa, Homo sapiens
MGYLWTIWMKMKNIFSGKLPIDSLEGDLEKSTRKVKDKQLLTLWILIPWANLLCLEAITRFLQISQNCILLTVSTHR

SEQ ID NO: 37677 - protein, 26 aa, Homo sapiens
IVFLFIFLIVVFFLLYITSSSAVRWR

SEQ ID NO: 37678 - protein, 31 aa, Homo sapiens
LQTMGTLGSLGVTMLHLLFICLGKSCSSHTL

SEQ ID NO: 37679 - protein, 15 aa, Homo sapiens
LLKAMIVFVLLPPTS

SEQ ID NO: 37680 - protein, 26 aa, Homo sapiens
LREGFVLSSVLWCRASSSPAQPRRLN

SEQ ID NO: 37681 - protein, 57 aa, Homo sapiens
IPRRRFSGLGFLPYSLLLPLSGFYRPFAKQLSTQWSFMSSCRKYSSTDVADFAPWQN

SEQ ID NO: 37682 - protein, 39 aa, Homo sapiens
LHLSRRLCRHSLPLFRVCVATTAGGIRGVAYRAGPAPQP

SEQ ID NO: 37683 - protein, 23 aa, Homo sapiens
MGFWVGVLVFLCSFKLSPTNRKL

SEQ ID NO: 37684 - protein, 42 aa, Homo sapiens
KHFQSLSGAQRFGRLIDHGARVLLVAAAAAAGARLCDHARTL

SEQ ID NO: 37685 - protein, 49 aa, Homo sapiens
MLTVLSPPAFGLGFSSLFTCRLSHSLPFPQHHSPRKSQCFPPIILSADP

SEQ ID NO: 37686 - protein, 97 aa, Homo sapiens
LFVGVVPGTGFGELVYNQGLILKMSFFILLFFKHQILLFFFFLPSPQIPSQIILLTTIPTGRGELKHLLPLPCFSFIFYFFASVLMFLHTLHLYSKV

SEQ ID NO: 37687 - protein, 75 aa, Homo sapiens
LASVAPQARGIQGLGSGRVWSNPLSLSASWAHLPGSLALLFQNCLLFSAAIALAGGSPCRRAKGLPGEMPPDPAI

SEQ ID NO: 37688 - protein, 30 aa, Homo sapiens
IAIKGALTVHSAISLFLCPQIPTTAPRGWA

SEQ ID NO: 37689 - protein, 22 aa, Homo sapiens
TPTFLFALLSLSHILETVFNTH

SEQ ID NO: 37690 - protein, 18 aa, Homo sapiens
IMKFVDTVMILILAMVSQ

SEQ ID NO: 37691 - protein, 32 aa, Homo sapiens
VAGKGLFFHFVRKSTEFLLYLLQLCLQPLTAG

SEQ ID NO: 37692 - protein, 52 aa, Homo sapiens
ISTASSESLLMPTLTLFPSALIATGGHAQHQATSEPRRSSVAFPWPFAIRCL

SEQ ID NO: 37693 - protein, 27 aa, Homo sapiens
MQLKYMLLTFFFFLKSSVDKTRGMWTF

SEQ ID NO: 37694 - protein, 56 aa, Homo sapiens
RRQIAHGHASCWLYTRTKTDKYPHHDVTHIAADFFREKCVLLLFETSVVVALYCNI

SEQ ID NO: 37695 - protein, 15 aa, Homo sapiens
LHLPAISLPLLLSGV

SEQ ID NO: 37696 - protein, 62 aa, Homo sapiens
MEPWPSLWGWMPHSTASWRLLTMAGAGWSWLPTSACSVLPRWGPSCSMRCAGWPEARQAKLG

SEQ ID NO: 37697 - protein, 114 aa, Homo sapiens
MYSFKHHLCPPGFRIALDMGYTKREWNFQEAAVLWVTVILYSLKLSSFNWPLGAKAPWRVTPIRSGTLPLLPNLRAEMASTAPSRTQRRCTAATEVGRMIRLPPKAQFLQQVNP

SEQ ID NO: 37698 - protein, 20 aa, Homo sapiens
LAVFRAVMFLGYVQDFRVLA

SEQ ID NO: 37699 - protein, 38 aa, Homo sapiens
MLGCLLVVFLCCLILGKLLCKAKNPVNTILSFTGRHYW

SEQ ID NO: 37700 - protein, 59 aa, Homo sapiens
MLVSKNQQKKKLRKLRTNIKKIKFRIRMISLICPFFLWSKTLLNFCKYFDLMCLRSSLF

SEQ ID NO: 37701 - protein, 41 aa, Homo sapiens
MITSKLWESLEIFMMIKDTFILTLKPILLFSALNQGRSLWV

SEQ ID NO: 37702 - protein, 59 aa, Homo sapiens
TTASTVRSPAEPGPGGESCLHGRAPRPHRRSRHHLSPSLVPAMGFVSSSALVTDLDTEY

SEQ ID NO: 37703 - protein, 22 aa, Homo sapiens
IFLFLPIFSFPQIFLLLFYHLE

SEQ ID NO: 37704 - protein, 36 aa, Homo sapiens
LLGVGLAVVVSLTLTAVILVLTRRCRTASHPVSASE

SEQ ID NO: 37705 - protein, 33 aa, Homo sapiens
MLPRRRVFFSLFFQIFCMFKHFHSRKLGGKSVS

SEQ ID NO: 37706 - protein, 54 aa, Homo sapiens
MQYVLNKYILRQTEQGPSLFCLQLCFLIAAFQNVTLANYQERGTNLRDPDQTAS

SEQ ID NO: 37707 - protein, 58 aa, Homo sapiens
MSLSRAAQGPHSWLLTLASPMAALQTLLLSSPHIRTCCSHSGVLKSMNRYCCIFHNAD

SEQ ID NO: 37708 - protein, 70 aa, Homo sapiens
TARRSAALWAQPAARKAARGSGPVWLGAAAQVVARAVVARSPSRPRAQPQSASSRSGTRPTPVSVPGCAC

SEQ ID NO: 37709 - protein, 72 aa, Homo sapiens
RAAKSDFELQLAVWNVAQEALIFLAGTVAAVLACGPGQPLPSRRAGEDWCMLGFVVRPHEARPGNIMGRNGA

SEQ ID NO: 37710 - protein, 62 aa, Homo sapiens
LVATIRKSNTNSNCFLLFTFASLLVELWQVLISNTEHDLPPANVEPGIAASPDSSFIHSDSP

SEQ ID NO: 37711 - protein, 52 aa, Homo sapiens
MARSSLFSGLTIPVHPSPSTWEPQKSNCKLGASRSRLTSTGAWLRVPSWSPK

SEQ ID NO: 37712 - protein, 9 aa, Homo sapiens
LVALITVMI

SEQ ID NO: 37713 - protein, 65 aa, Homo sapiens
LWWALSPGFLAACCACGSLGTVGLCVCPCVCMCVCMFLSPLDSCTKWLMGTISRQIVKIDRKSFS

SEQ ID NO: 37714 - protein, 56 aa, Homo sapiens
LLLLLLFQEHTLRTIVLLLCTPTHSQLPRKKSTSRAKISVEVLVPYLVQDLPSRIS

SEQ ID NO: 37715 - protein, 76 aa, Homo sapiens
ISVSFIVALLSAREPLAPGRHSCFSAPFLSARWMLMHWRSFSLPLHGACWRRRELCWHEPQFLDWRPSTLLVEALF

SEQ ID NO: 37716 - protein, 33 aa, Homo sapiens
LNPQFSHSAVHSCVILGPSLYLALDLPGSSRRK

SEQ ID NO: 37717 - protein, 26 aa, Homo sapiens
LNIAMKFSFVIGSLGRVSFCSTCCLP

SEQ ID NO: 37718 - protein, 36 aa, Homo sapiens
MAANALPACVLTGASGRLLAGATQRVPACLLHRLQR

SEQ ID NO: 37719 - protein, 43 aa, Homo sapiens
LELFPEHRTKRQESKVVMSLVICLLLKVTSRASSWHCFWNTVT

SEQ ID NO: 37720 - protein, 51 aa, Homo sapiens
IHTHIHTDTQSHTHSHTLSLSLPLSFSLSLSLCPFLLDRSTVIHRNKHTRT

SEQ ID NO: 37721 - protein, 55 aa, Homo sapiens
LQILPGARQALRPGALAVGDPPRIPPLLRAPRGLWRLGLLSGLSWLVYALCLISG

SEQ ID NO: 37722 - protein, 32 aa, Homo sapiens
KMCEFFSVSIWMCPVLSCVFSALSMVSFSENE

SEQ ID NO: 37723 - protein, 33 aa, Homo sapiens
MARAAAAACGSCSWRCCGHTPATRSRPSAFGPI

SEQ ID NO: 37724 - protein, 33 aa, Homo sapiens
RYKRKITEKKRKEPQRSCSVQSQILLLLLWLIG

SEQ ID NO: 37725 - protein, 36 aa, Homo sapiens
TRSKEMSGNSYFIGIYLKHLMLLISGVSQPLRTEHH

SEQ ID NO: 37726 - protein, 71 aa, Homo sapiens
RTEARLVFLQKFPPWAVVEVVTVIVAAPAAATATTRDGGGCSRNCNIPEVFPELLGCPNRRGPPGGVRGAD

SEQ ID NO: 37727 - protein, 35 aa, Homo sapiens
IPKKKKKKKKKKVVTIAFSVSYLFWFAETSPKQEI

SEQ ID NO: 37728 - protein, 20 aa, Homo sapiens
MGLMGPMLLTAVSLLLWMLE

SEQ ID NO: 37729 - protein, 63 aa, Homo sapiens
MSPSRHMDQAVILLFWQMTLNVYRSFLVLSMETSKSAVWSVLTNKEELQLHMVMLFVYLSPWA

SEQ ID NO: 37730 - protein, 91 aa, Homo sapiens
MKAQMQAKSLEFSAHSKCSMNRLAAVRWGHSLLLSGCLTVPCPCLTGPSISAGELSSADKPAWHGALPLLLVPDPFCPEENFLSPGDAWPR

SEQ ID NO: 37731 - protein, 81 aa, Homo sapiens
RTGLGFHLCVCKCVCACVQVSVCKCVHMCACACMCTCTPMCECVQVCECVQVCVRVSMCVQVCACVRVCACVCSGACGSRV

SEQ ID NO: 37732 - protein, 39 aa, Homo sapiens
MQQIFIQQCRELNFWSREPWILVLALPLTVWPWEVLCLL

SEQ ID NO: 37733 - protein, 21 aa, Homo sapiens
LHIWLLGFARAFLFCQTSHAG

SEQ ID NO: 37734 - protein, 9 aa, Homo sapiens
LLFIINLLG

SEQ ID NO: 37735 - protein, 53 aa, Homo sapiens
TPATPAALRTVLAVAAAAPVSRWARTQPLGAVAFPASQRQKRGSGTQKVGLRL

SEQ ID NO: 37736 - protein, 106 aa, Homo sapiens
LPRHSPLDLNLKSPSLPWLDPGDPFALPSAPSPTDLLCDLRPVCRPLWASVFPAMKTAISQSCVKQKRKAGGRPWANGRALVIINIVAAVVLLLLINIHIIYFILT

SEQ ID NO: 37737 - protein, 73 aa, Homo sapiens
LSLPGSLSLCLCPRAPPQPLPRSPSRVPFSERSSALRAALSGRPHSSGLPLRAPPDLLGFPLRTPSTLPKGSP

SEQ ID NO: 37738 - protein, 99 aa, Homo sapiens
VAEAQAVAAAAQEAADGELREQARPGSLAAAWLQHARPPGAAAAAAPLAARRALLLFSLVLAAVLRLCGARHSEHLPLHDASPRHSDPGQRENNRCSGL

SEQ ID NO: 37739 - protein, 9 aa, Homo sapiens
LVFSLVSFF

SEQ ID NO: 37740 - protein, 28 aa, Homo sapiens
LPLPLILPCLAANPGARADPPLPLPFSR

SEQ ID NO: 37741 - protein, 41 aa, Homo sapiens
TRRKVPSPLATSLPALTAHAVILVTEKLFAWKVPACLPAGP

SEQ ID NO: 37742 - protein, 76 aa, Homo sapiens
LRNRGLLEGVKGACVDVAVAVCVSVCLCVCTVYMNVPQDMAYNGLGGPNNIKYILEMRVPVLDRPRHAFCFSFNAP

SEQ ID NO: 37743 - protein, 8 aa, Homo sapiens
VLVTLAFV

SEQ ID NO: 37744 - protein, 64 aa, Homo sapiens
VWLCLSSALLSPPFFLSVPRVRPPPPPRERRRRGSGHSRSYLVVSGCHDLYSTALQRRAQLDQF

SEQ ID NO: 37745 - protein, 52 aa, Homo sapiens
MAASRGGCLQLLQPQWACVTCALLVLLSVGSLCSSAQLDPLPYCKDRGLSVS

SEQ ID NO: 37746 - protein, 54 aa, Homo sapiens
ICLLLILMLPAQQVHQRARMNYGCHECPCEAVGKPWLDCEGYLKSILESTRSSM

SEQ ID NO: 37747 - protein, 13 aa, Homo sapiens
IGLSGLLIPATFW

SEQ ID NO: 37748 - protein, 46 aa, Homo sapiens
MKDGAPDAAVLLVQPAAPESAASTTARAGGPASAAVGAEQPLLQDV

SEQ ID NO: 37749 - protein, 46 aa, Homo sapiens
MGALLGAPSPGRGRGRCCCTKVPRTALASLCATSSCTHPSRPCTAA

SEQ ID NO: 37750 - protein, 80 aa, Homo sapiens
MRPKAPAASLLATFPISQRLIPLTPARKHCPSESETSTWVVSKAPATPRTRGAGPTSPPRPTRRRYGVQFAEAVCCGRGV

SEQ ID NO: 37751 - protein, 61 aa, Homo sapiens
MVSGAGVSAVAPLPSPSCMLLPAGNPDDLQCSQGAGSAVQTQGSHGTRRSQELDPKAVRGC

SEQ ID NO: 37752 - protein, 95 aa, Homo sapiens
MRIDPQEGGGVKAIGPLGRRSMRLGPRRRAACGRVAFGSSTFALVPVFAHLSILQSLVPAAGAASPVAISAQHLCYSHVTPGDPGAGAGQGPAPS

SEQ ID NO: 37753 - protein, 102 aa, Homo sapiens
MAPASHLPEETLYISPRFLMPSEGLRSGVCHTFLLTSNCHWDRVLGAYIFLRVFISLTCVDLITLTLPSWKGPVTPQMSGQLQGRRKNRKSSFNSSRNKRND

SEQ ID NO: 37754 - protein, 138 aa, Homo sapiens
MEVEVSQDRTIALQPGEKKKPGLLMYSFKHHLCPPGFRIALDMGYTKREWNFQEAAVLWVTVILYSLKLSSFNWPLGAKAPWRVTPIRSGTLPLLPNLRAEMASTAPSRTQRRCTAATEVGRMIRLPPKAQFLQQVNP

SEQ ID NO: 37755 - protein, 29 aa, Homo sapiens [sequence omitted]

SEQ ID NO: 37756 - protein, 51 aa, Homo sapiens [sequence omitted]

SEQ ID NO: 37757 - protein, 97 aa, Homo sapiens
IIGVLRKVRLAGTWLWVGWTGCRTECPAVGRSMRQSDAHPGAQHRSNCRRHCLRLCAARGCVPEQEARFLGLELPFLASGKSPRTESKGQILSVSAV

SEQ ID NO: 37758 - protein, 34 aa, Homo sapiens
IIFFLSSSFLTTLIVGRSKCSFILVLVQVQELKT

SEQ ID NO: 37759 - protein, 94 aa, Homo sapiens
MSQDNDKLSKFFLLLLPGPASTLLLFYHAAFLLEPEQLPEKRRTSKAFWNSPRRSGWRVPLKWTGPTISQSWPFTSCPLSSGEPHVWKSCGGCW

SEQ ID NO: 37760 - protein, 17 aa, Homo sapiens
ITGMLYWTSLLSSAPAP

SEQ ID NO: 37761 - protein, 32 aa, Homo sapiens
LMLLTTWLLHSHQTRDAILDFPTLICSSPLTL

SEQ ID NO: 37762 - protein, 49 aa, Homo sapiens
VRNFLFLPSLRLQCLMGLPVGGSVFAVPGRSGEPWEEVLRRPSLGSPQD

SEQ ID NO: 37763 - protein, 41 aa, Homo sapiens
MYYRYNCTKIVQPKTICNCLLFYCILFVFLRPLIAFCNLMA

SEQ ID NO: 37764 - protein, 74 aa, Homo sapiens
RVTVVRPAPLDPLVLLVLLVPLAPLALLARVVIVVRLVLLVPPVLSALLAPVAPPDPKAPVVTRVRQANRATEA

SEQ ID NO: 37765 - protein, 159 aa, Homo sapiens [sequence omitted]

SEQ ID NO: 37766 - protein, 65 aa, Homo sapiens
MLLGRSGHLLLALIPAEFLLLISGPLMLLLRRYFPASLPLRHRLRTSLNARQDSVRMDRAARSRR

SEQ ID NO: 37767 - protein, 97 aa, Homo sapiens
MGSCPGLTWHMLGKPLGARAGGRASAAPPSPTQGVRNTAERESGAFMLLLPPLVHGFFHLETPGGGHCCTACATDQNRPKLSEGWDHLRLCSTYVVE

SEQ ID NO: 37768 - protein, 89 aa, Homo sapiens
MHLQPPQPKAPKTKHAVHTQQLFVSHSWPISCIISLSFIEPRSLHALWNSGSSFCMKLRVFIFRGTQSLLALWNLESQGLCAPWNLGSV

SEQ ID NO: 37769 - protein, 145 aa, Homo sapiens
MALSPPSPLTRSCALSWPRNGTSPSGALVGRTSASCGLAISMLSLAGTAPWKVAGRWHSKALQRCSCPQTPSLPRPCLRTTTCSVPSFSASISPPCGTTTSTAGTPRAATRSLHFCVKEVKHVLTSRTTWWMKGSTSPLRGTTHA

SEQ ID NO: 37770 - protein, 16 aa, Homo sapiens
MGWASRDRPDASSRWS

SEQ ID NO: 37771 - protein, 25 aa, Homo sapiens
MLLFPLFLLLSLDLCQKEGYAESLI

SEQ ID NO: 37772 - protein, 105 aa, Homo sapiens
MERKIHWNSWRASLSLESLFCYSLLLLLPFPTPSQAREICVKFTRGVDFNWQAQALLALQEAAEAFLVHLFEDAYLLTLHAGRVTLFPKDVQLARRIRGLEEGLG

SEQ ID NO: 37773 - protein, 23 aa, Homo sapiens
MVDIRPWSAAWKFPVNKKNIIAS

SEQ ID NO: 37774 - protein, 31 aa, Homo sapiens
MPGLTLLRSCFYEDVSQQLSVFPMSHRQPLQ

SEQ ID NO: 37775 - protein, 57 aa, Homo sapiens
MRKINIVIYQPASSQQFLPACPCKGRSGAASCSNYLWSQLNSFSPELQKVPESPQST

SEQ ID NO: 37776 - protein, 160 aa, Homo sapiens
MACIYPTTFYTSLPTKSLNMGISLTTILILSVAVLLSTAAPPSCRECYQSLHYRGEMQQYFTYHTHIERSCYGNLIEECVESGKSYYKVKNLGVCGSRNGAICPRGKQWLCFTKIGQWGVNTQVLEDIKREQIIAKAKASKPTTPPENRPRHFHSFIQKL

SEQ ID NO: 37777 - protein, 134 aa, Homo sapiens [sequence omitted]

SEQ ID NO: 37778 - protein, 64 aa, Homo sapiens
MRNGGLRSRRKISSPTSPLLQSALLSTRDLQWRPQAAASVFDRPFVSTLPALAGWVRQASPARL

SEQ ID NO: 37779 - protein, 12 aa, Homo sapiens
MAIMWSQEEPFC

SEQ ID NO: 37780 - protein, 129 aa, Homo sapiens
MGLRQPPSTYWAQAQLLALSCTPNSTQTSTHTHTHTLTHTHTWRARSTSTSTISARRHRICSGHGGAGQTGRLGGWRTELQTKAGDPWRGGMASTPGSLCVRHSPWTHTHRHTHCLDACMHTHARTRAP

SEQ ID NO: 37781 - protein, 6 aa, Homo sapiens
MAGKRI

SEQ ID NO: 37782 - protein, 53 aa, Homo sapiens
MFLLRSSSSFPALLLPLQISPPSASDWIKGNHFSKGSLALSFQAILQPPEPST

SEQ ID NO: 37783 - protein, 182 aa, Homo sapiens
MSLKSATKWGRRCNYYYQHLESIMNLLEYFLALTSFILRCSYWIFPSANNMEVPIQGQIIPGFIWSCLKVKSLEFLMIPFLYGLQFDRWEFSTLKKTQFHHVTQAGLALLGSSNSSLPAAALQVLGLQLQGLTFLGLTKEDAVGCESLLPMLKWQVYDTKDAVQQSSHCAQHQYFFLPPSSC

SEQ ID NO: 37784 - protein, 23 aa, Homo sapiens
MGRRKSWREPSLDFGSFWKMLQL

SEQ ID NO: 37785 - protein, 50 aa, Homo sapiens
MKGLVKGLQGDGLGGRRFLFLLPFCLCSPNVPVSPLPHLGPLFGPCGQSC

SEQ ID NO: 37786 - protein, 29 aa, Homo sapiens
MLVSQNGLGNATPLLSERVYIRASLCRPC

SEQ ID NO: 37787 - protein, 32 aa, Homo sapiens
IDTLKVLHMIRKQLWKMTAFISLNILPYGTDQ

SEQ ID NO: 37788 - protein, 14 aa, Homo sapiens
MRLGLQKLLYGILF

SEQ ID NO: 37789 - protein, 50 aa, Homo sapiens
LESPAAVGLLLLLWLSLPVRLPSFVVSQRCAGLLLAALRIQGVGCQVQVS

SEQ ID NO: 37790 - protein, 6 aa, Homo sapiens
VLVFLM

SEQ ID NO: 37791 - protein, 27 aa, Homo sapiens
MMTKNVLKNMTFYKMAVIICLHLMHVF

SEQ ID NO: 37792 - protein, 29 aa, Homo sapiens
LFRPRRRFPVTRALTSQLSLAVLLRVPGA

SEQ ID NO: 37793 - protein, 45 aa, Homo sapiens
LFSTNRIWSLVLHLLSVARIPPSPLASPLLGSSPVGIHVSSLTPP

SEQ ID NO: 37794 - protein, 19 aa, Homo sapiens
IASHLFIFLGIFIALNKKY

SEQ ID NO: 37795 - protein, 10 aa, Homo sapiens
LTPSVVRKQW

SEQ ID NO: 37796 - protein, 41 aa, Homo sapiens
IWGDFIFRSLYKGFLMSITCWMRLCSSPPLSEWSVSINWTP

SEQ ID NO: 37797 - protein, 42 aa, Homo sapiens
VSSWCTCLWALPSALPGGPARALCAQDAPASRRGPAPAQTGR

SEQ ID NO: 37798 - protein, 58 aa, Homo sapiens
RSAPAPATFSESGKGARGHMSPSRPTENETALQQIGWKELGLFSLFFTLERACKHCSF

SEQ ID NO: 37799 - protein, 14 aa, Homo sapiens
ISSFLFLLGLGSLL

SEQ ID NO: 37800 - protein, 34 aa, Homo sapiens
LPPPPPPPPPPPSARRTGRRSRSWRRSRRRQLPA

SEQ ID NO: 37801 - protein, 22 aa, Homo sapiens
LSHSRRRCGPTACWRWSHRTCP

SEQ ID NO: 37802 - protein, 32 aa, Homo sapiens
IVHFLFFFLGSLLFKKYPCVFQLNHPFIFKPS

SEQ ID NO: 37803 - protein, 57 aa, Homo sapiens
MPAPCPLQPLEEAGGPGGHGNSRYTLWRLLAWVVWALGGSPRSMSTMFLGTSGYSWL

SEQ ID NO: 37804 - protein, 49 aa, Homo sapiens
RVLKLSSLWGCVFLVPGSPRLPRRTWKRKEQSLQRLQREDKKRLHLGEF

SEQ ID NO: 37805 - protein, 63 aa, Homo sapiens
IKNPFIGLSPPSPLSIATFSSFEFELWSYCSTVWRGRGLGVFSFVCFPFFFLFFFFFFLLALR

SEQ ID NO: 37806 - protein, 41 aa, Homo sapiens
ILWRGLLWTFTFSSSSAIAGEGAIPDPQACPPLPQTPHQVL

SEQ ID NO: 37807 - protein, 91 aa, Homo sapiens
LLGQPPPQRETEVRLRFLQDRPLLLLSPNPFLPRVPGSQGNRTNCSLGGRATAEYKAFRPPASLALMAAPFRPVSSGLSMPGLISTRLGNS

SEQ ID NO: 37808 - protein, 107 aa, Homo sapiens
TRARRRRKRRTWSPRRRRRRTATPRRPRILRTTRRMRWKRTTMTPIIRRRWKTTTTTPVTARKAASGAIVPTAALQVGENQEYIGLVLLYWKKKTSRPLNFPSPLRI

SEQ ID NO: 37809 - protein, 26 aa, Homo sapiens
KMPGHPGSCEVFRCIISSLNILLVRL

SEQ ID NO: 37810 - protein, 19 aa, Homo sapiens
LASRTRVCSPSAISQVCGR

SEQ ID NO: 37811 - protein, 62 aa, Homo sapiens
KGLLPPLPAAGFHLARACCFLRARPLPPVLLFVPFCFPHSLPQLIARHLGPCPHSPSTLQGT

SEQ ID NO: 37812 - protein, 74 aa, Homo sapiens
MQALPPRHLLSCMGLQPMPAPCPLQPLEEAGGPGGHGNSRYTLWRLLAWVVWALGGSPRSMSTMFLGTSGYSWL

SEQ ID NO: 37813 - protein, 19 aa, Homo sapiens
LQSLLILFLGVTIFEAKLT

SEQ ID NO: 37814 - protein, 10 aa, Homo sapiens
IVVLFSSLAV

SEQ ID NO: 37815 - protein, 33 aa, Homo sapiens
INYFFFLKLFLSLQNLILALDLRRESLTRDETQ

SEQ ID NO: 37816 - protein, 41 aa, Homo sapiens
MYRCALCVQSFTLTTSLCHLAEVVWFTITAISAFLSGKPEA

SEQ ID NO: 37817 - protein, 18 aa, Homo sapiens
ITKVVFPEQGLAILLWMC

SEQ ID NO: 37818 - protein, 31 aa, Homo sapiens
IVFLLQVLLMFKIACQLLSHEFSNKKMKSLC

SEQ ID NO: 37819 - protein, 63 aa, Homo sapiens
LCPFLASLAACTSRLVGRTVGRACGSPPRPPRGLGPAAASSTAAGWESPRDAASGPAPGLCPH

SEQ ID NO: 37820 - protein, 16 aa, Homo sapiens
IRFLWTQRYEINQPHV

SEQ ID NO: 37821 - protein, 6 aa, Homo sapiens
LFILVL

SEQ ID NO: 37822 - protein, 12 aa, Homo sapiens
IAGINFKLLFLF

SEQ ID NO: 37823 - protein, 56 aa, Homo sapiens
MQSGPLWSGFWAPRLPGSLPFCSHLHLSSALPECWPRPAWGKAVGIVLAPSSSSPF

SEQ ID NO: 37824 - protein, 49 aa, Homo sapiens
MRQEAPQGSSGPPPPISSHTALCTFCSFFCKPKTALNNEVRHAETAHGC

SEQ ID NO: 37825 - protein, 64 aa, Homo sapiens
MFSLSLSLSLSLSLSLSLSQAGHHSVISSNKTSQVPKTFNSKRNPPSPRQKRRSHRPDGVEWTL

SEQ ID NO: 37826 - protein, 18 aa, Homo sapiens
MTDNCMSSILPTAARGRL

SEQ ID NO: 37827 - protein, 48 aa, Homo sapiens
MGPGPTSGHWPTATAGGPSSWREKGQVSIHAPRSRRPTSSRSSGEGDT

SEQ ID NO: 37828 - protein, 48 aa, Homo sapiens
MKEGCQVRAQPGSSHTSIYPAPQHWAPALTCPGPTVKTHPQKMHFGEE

SEQ ID NO: 37829 - protein, 112 aa, Homo sapiens
MAAVTAGEDCLRLPGQRLWCQVSSRTDGRPSSQRVKGQLLSPPGLLHPVNSPRNYQHPPKGHQPPCERTSQRPLELGCGRMWGAAWSCLPLPQRDMRDGAGLATWRGSHSWS

SEQ ID NO: 37830 - protein, 36 aa, Homo sapiens
MDPCSDLVLVLWNQLCTRPQKVCVPEPSCWGLSLLI

SEQ ID NO: 37831 - protein, 51 aa, Homo sapiens
MIIWINYRLLAGLSVIIHDSGLGKRPTAYVPKKGQSLMELGGLFYAICLHT

SEQ ID NO: 37832 - protein, 45 aa, Homo sapiens
MTHCSTPSHFAKLPSPPTPKQSRQRISGATAPGALLGAKGVYPFP

SEQ ID NO: 37833 - protein, 46 aa, Homo sapiens [sequence omitted]

SEQ ID NO: 37834 - protein, 32 aa, Homo sapiens
MNHLGHHICSISLQLAHRSPRCFVHIPLPFLL

SEQ ID NO: 37835 - protein, 40 aa, Homo sapiens
MLRAVSTWRFRLDPSCSGARLGGPRSLSFLASLGCGTKTI

SEQ ID NO: 37836 - protein, 47 aa, Homo sapiens
MPFFTLQLSSHYISGTIGVPGGYWSEVSMILTQETYSPDKNFHQNSR

SEQ ID NO: 37837 - protein, 156 aa, Homo sapiens [sequence omitted]

SEQ ID NO: 37838 - protein, 26 aa, Homo sapiens
MDTPLEPPQRQVARVRPATRPTLSYL

SEQ ID NO: 37839 - protein, 57 aa, Homo sapiens
MCCQIRGHYTKCVEPLPRGASTADIHSSAPPQPLLPLPSTAHGRVMRETQYRFIIRL

SEQ ID NO: 37840 - protein, 23 aa, Homo sapiens
MQLEPPEDDPFCLGPLDQPLEKL

SEQ ID NO: 37841 - protein, 64 aa, Homo sapiens
MAEANQSQDLNQGTNQLCTGMRFLHLPVPGIPPCFLTNQQSPHFSPTCSDPLQAPSPNPGGRRI

SEQ ID NO: 37842 - protein, 19 aa, Homo sapiens
MEFMASVLSEGEKNSHSSA

SEQ ID NO: 37843 - protein, 66 aa, Homo sapiens
MFQRSSLLPRLLVSAGMIHRPGGAARAAAAAAARAPPEPARRRGRGLGGKSRGPRARRLFLLQPYC

SEQ ID NO: 37844 - protein, 24 aa, Homo sapiens
MSILPGLWVSLLSYTSFQVTWDHG

SEQ ID NO: 37845 - protein, 61 aa, Homo sapiens [sequence omitted]

SEQ ID NO: 37846 - protein, 49 aa, Homo sapiens
MVKANFPSVGAGLGVVGRAGRRPRTMQNRQDVSQSRLPCPSGPWGLLRP

SEQ ID NO: 37847 - protein, 37 aa, Homo sapiens
MPFGSSGSCISGHAPCQPRQPRQHYHGMCFKIMQTLF

SEQ ID NO: 37848 - protein, 53 aa, Homo sapiens
MINTRSLKEPIACDRYRASALGLSAPPVREASGANGAEGIVGLGPSLFSFPVL

SEQ ID NO: 37849 - protein, 50 aa, Homo sapiens
MHTPPGLTGALENDRSPDLSPTTDAWSKGEGRRLMDPPCSEFPPLYVPLC

SEQ ID NO: 37850 - protein, 21 aa, Homo sapiens
MRKIFESTYDYKPLFQDILPF

SEQ ID NO: 37851 - protein, 27 aa, Homo sapiens
KEKSSCHWWWLGWLITSMLSCKEEFPD

SEQ ID NO: 37852 - protein, 6 aa, Homo sapiens
LQALRK

SEQ ID NO: 37853 - protein, 8 aa, Homo sapiens
LPLPEDFR

SEQ ID NO: 37854 - protein, 54 aa, Homo sapiens
TGPAAVLQTGEKRKILMFRKCHLFQTLFLSYAVLHLHLCCQQTYFPKQIQGKNR

SEQ ID NO: 37855 - protein, 16 aa, Homo sapiens
MTAKKPKRPKSTRQKE

SEQ ID NO: 37856 - protein, 23 aa, Homo sapiens
ILLQHCHLRIHKPTLVRIQPSVF

SEQ ID NO: 37857 - protein, 33 aa, Homo sapiens
MRSTLISSLDSLLPVIPHRTEAEWVVVMFDRRH

SEQ ID NO: 37858 - protein, 24 aa, Homo sapiens
ILAFFFFFFFSSPFLLPLVLQSQK

SEQ ID NO: 37859 - protein, 23 aa, Homo sapiens
LVPWVYFVFLSLLHLSRPFRAAL

SEQ ID NO: 37860 - protein, 34 aa, Homo sapiens
ILSMRELLLCLLMEVFTAQGFLILIQEIRSWYGD

SEQ ID NO: 37861 - protein, 65 aa, Homo sapiens
MQFWECSGSLCSFLSCKPWAPLGPLGSLCYTCFLSVWARAAQATPCDTEISYENTQPACSPPGRC

SEQ ID NO: 37862 - protein, 61 aa, Homo sapiens
MQFWECSGSLCSFLSCKPWAPLGPLGSLCYTCFLSVWARAAQATPCDTEEDSTLHSHLLCS

SEQ ID NO: 37863 - protein, 37 aa, Homo sapiens
MPPTLIPRELRCFLLPWPLDPAIASIPGHLAEAGNSG

SEQ ID NO: 37864 - protein, 18 aa, Homo sapiens
TNFPVLMELAFKREGGRQ

SEQ ID NO: 37865 - protein, 27 aa, Homo sapiens
KDKERLGTDFSLIQVMKSSHLRGCDHG

SEQ ID NO: 37866 - protein, 19 aa, Homo sapiens
KDILIFLILLLIIKESLLD

SEQ ID NO: 37867 - protein, 112 aa, Homo sapiens
LKSSFLRGLGSWKSNPLRLGGWTILLTLTMGQGEPGGPQGDPWVPHELLLPSLCDSSHASSWGSGSITCAWRGGDSSSHPLVSGHILSNSPVAAVMCSSMGTHLSPFKGTLL

SEQ ID NO: 37868 - protein, 85 aa, Homo sapiens
LSENSCRGCCCWICWAHVQFFCKFHRASVPYLWNHICLRLLLCIPAFIGHFGTLFQEAPWTGEWHCHCWQQCLHNPAAFALKGSD

SEQ ID NO: 37869 - protein, 28 aa, Homo sapiens
RLMKFAFRSLLPLCAILMPLLSILNLRA

SEQ ID NO: 37870 - protein, 17 aa, Homo sapiens
ILIFLILLLIIKESLLD

SEQ ID NO: 37871 - protein, 93 aa, Homo sapiens
LPFPFHSSFLESDIRKPARRKIQTTNPDFLLLLFMSVPVVSAPPFCPPAEGSRDGRPKASVARPAAVHEHHSPRDCGHLPDVLRSSLGGWQPH

SEQ ID NO: 37872 - protein, 12 aa, Homo sapiens
MLTSTLFIFQCL

SEQ ID NO: 37873 - protein, 11 aa, Homo sapiens
LTSILFILQCL

SEQ ID NO: 37874 - protein, 40 aa, Homo sapiens
TSTSCIFGFPPPLLFISDFLLLLVFFFFLPPFFIYYFFAH

SEQ ID NO: 37875 - protein, 64 aa, Homo sapiens
VTSCTWILRTSGSWATCWSVCWPITLAKNSPHQCRLPIRKWWLVWLMPWPTSITKLAFLLSNFY

SEQ ID NO: 37876 - protein, 23 aa, Homo sapiens
LQRLLVFQVFLFIQLDTMMHRSS

SEQ ID NO: 37877 - protein, 29 aa, Homo sapiens
KKWREHSVSPTSFLTLLPYLSFFPTGLSR

SEQ ID NO: 37878 - protein, 33 aa, Homo sapiens
LPSVRLLQWWGQMLWTLGPAALPLLAGRCTREV

SEQ ID NO: 37879 - protein, 99 aa, Homo sapiens
MAHPERAWKLRAPSHRLSPIHLFIWCSSIAFVMSLIVNRKTQVLSTLPKLECSGHSTGGIIAHRSLKFLGSSDPPISASQVAGAIGMCHHTQLFLLIAK

SEQ ID NO: 37880 - protein, 59 aa, Homo sapiens
MEQTHHLPKKAEGETVPLLRDTMTLMPVSMKGTEKSTTSDRSSLMMATEEFDDLPKLPR

SEQ ID NO: 37881 - protein, 54 aa, Homo sapiens
MDWHFPAAPSLSTTGAQPGHRRFNEGRAERPNPPSHRACSPPWLLPAPGPGLTT

SEQ ID NO: 37882 - protein, 19 aa, Homo sapiens
MRGVSAVSWIWFQPHLLHV

SEQ ID NO: 37883 - protein, 44 aa, Homo sapiens
MIKLYSPLFMTRYNSPSPLKSQLLVSLSWTSVIGRLLMSIFNLC

SEQ ID NO: 37884 - protein, 42 aa, Homo sapiens
MEAPCRNMVLTLWGLYPKLKGLEKPLKSRDHNPPPSKDKTSH

SEQ ID NO: 37885 - protein, 128 aa, Homo sapiens
VNICGCPLLFFLLFQLLLLLPLPSRSRKPPTQLTLAQLQTVSSAQLYLAPRAPLRHWTHRRVFYFLQSCIAVHIFVPATSLCLWSALQPRKLLLELRPSAPAGQWRSPPSSRAQPLLLWADDAEDALL

SEQ ID NO: 37886 - protein, 49 aa, Homo sapiens
VTQPMTLLLLLKSPYLAFLKFQGSLCATYHSPLTLVPSGPIVDGCMGAM

SEQ ID NO: 37887 - protein, 35 aa, Homo sapiens
LLFLQLYQHILCPFTNPFLHVFLLMMVLEKSGLFH

SEQ ID NO: 37888 - protein, 45 aa, Homo sapiens
LNILRTGIFVSALLMYPQQPELPDMPSSGDDFTFDRSCPSKANMQ

SEQ ID NO: 37889 - protein, 19 aa, Homo sapiens
MATLYLLIYSFCIYQAQFW

SEQ ID NO: 37890 - protein, 25 aa, Homo sapiens
LNILRTGIFVSALLMYPQQPELPDI

SEQ ID NO: 37891 - protein, 71 aa, Homo sapiens
LDLLLSLQTLRAQSPSSFMKQGVPSETQVFIETCFVLGNVPDVGDKMETSEMKMQRQQGKPYMFMDSHAKV

SEQ ID NO: 37892 - protein, 38 aa, Homo sapiens [sequence omitted]

SEQ ID NO: 37893 - protein, 40 aa, Homo sapiens
LTHVAYIKPLCVVCGFIHLGTLFPLPPLGMRLYTGSTRGQ

SEQ ID NO: 37894 - protein, 35 aa, Homo sapiens
MGQTRILSLSKLRKSPATFVVHNVGLEKWKTPILE

SEQ ID NO: 37895 - protein, 54 aa, Homo sapiens
MITQLECKPQYFTESLALSMGPATGIKLFSSPAVTSSTSFQIYLTLNLSFVTSM

SEQ ID NO: 37896 - protein, 62 aa, Homo sapiens
VGQYTGLLTLFLAPQTTLYLPHCHPATLMGLHSKGRISSELFFFLKKKKKKPLVIQALSFNR

SEQ ID NO: 37897 - protein, 26 aa, Homo sapiens
LRVLLSTWRFMHIATAIIIIIPIQGK

SEQ ID NO: 37898 - protein, 33 aa, Homo sapiens
LCPHQMLNLLSTLIFHFTFIRTTGAVAEMSHGR

SEQ ID NO: 37899 - protein, 24 aa, Homo sapiens
MRFFCLQQRKGKKTPQGLRWLLHE

SEQ ID NO: 37900 - protein, 50 aa, Homo sapiens
LFVSLFVSLPDLPAGLLFFPFSSLAVLYLMVWGVQIAGCGLVSALHFRSR

SEQ ID NO: 37901 - protein, 55 aa, Homo sapiens [sequence omitted]

SEQ ID NO: 37902 - protein, 95 aa, Homo sapiens
LFLYTHWQAWCRLPRPPARQPGKVGYRAKELSSDTGRGASSHRETKQEPFPLASSSALPEGLLFALSLLKLCCFYFSPFCLGFMRALLSLRGKRD

SEQ ID NO: 37903 - protein, 24 aa, Homo sapiens
LPYSRHTLSSLGLLWPLTSLSSAF

SEQ ID NO: 37904 - protein, 21 aa, Homo sapiens
LSSVLLLLYPLSLLSCPLLLS

SEQ ID NO: 37905 - protein, 98 aa, Homo sapiens
LKACLGWRSISKVNHSHTWHVSVRYWQSSVPLLSGLSTGCLSVLMTQQLAYSRVSNSRESKAEATKSLCLKSCTIFSTSILLIILISLFSLGGNCTRA

SEQ ID NO: 37906 - protein, 33 aa, Homo sapiens
MIFFSLTNFLFIFAGTLFLFQTPNSSFIHAIYA

SEQ ID NO: 37907 - protein, 92 aa, Homo sapiens
LSAAPGKPQPLPGGEPASCLHCPRSTHRHLPGVWLTALSGPLSFLTFCVASHFHQHSMGSRPTARWGHGPQLGGDCLLAQGPVFCHSGCKIS

SEQ ID NO: 37908 - protein, 44 aa, Homo sapiens
LGLRVLTRGRAGRLGVPHLLALPSLPSPALQSQPSWVPATTAAG

SEQ ID NO: 37909 - protein, 63 aa, Homo sapiens
LRPRSLEEGCPGLWMLLLGVVGAAVGRVAGSGGDSLGFRGLLFLVLLLSSLFPVWPWLTLKTL

SEQ ID NO: 37910 - protein, 62 aa, Homo sapiens
LDGGASLGRRPAGMLLLGVVGAAVGRVAGSGGDSLGFRGLLFLVLLLSSLFPVWPWLTLKTL

SEQ ID NO: 37911 - protein, 79 aa, Homo sapiens
LGRGAPEIVAGRGTPSSASRQRRFSWFLLQMLLLGVVGAAVGRVAGSGGDSLGFRGLLFLVLLLSSLFPVWPWLTLKTL

SEQ ID NO: 37912 - protein, 15 aa, Homo sapiens
MAPVPLTRIHMGLQF

SEQ ID NO: 37913 - protein, 18 aa, Homo sapiens
MALIYVCFNLCFVASEGL

SEQ ID NO: 37914 - protein, 28 aa, Homo sapiens
MLFKRLCIKLCTLSMCSLLYVNYTSINL

SEQ ID NO: 37915 - protein, 68 aa, Homo sapiens
MRTSRISFVGKESLFKDVHWPSREELLLQLKIGLELTGDLALDGRKRCSCRFGSSHTGGRGKLAVCSS

SEQ ID NO: 37916 - protein, 32 aa, Homo sapiens
LLLPLLLKFFLTLPTFPSFPSRRLRLPTPPPG

SEQ ID NO: 37917 - protein, 20 aa, Homo sapiens
MFPLFCGVTFGLSSLLSVDP

SEQ ID NO: 37918 - protein, 66 aa, Homo sapiens
LPTLTPPLSSAWYGKQGARWSLIVLSSQQSQLSPHVAAAFAAHAACCFLFLIFPNCFLEMLVSNFS

SEQ ID NO: 37919 - protein, 71 aa, Homo sapiens
LRRLWLHFFGWWVMPGVGWAQALKSPFCLVVLHLALPGLWCRLGVDLSSVIYVCCLAPRWLCGQVLAKDII

SEQ ID NO: 37920 - protein, 42 aa, Homo sapiens
LLSCNYGAPQSLRNSLPLAGSPTGAMCTLLVFKQFSGFIYLF

SEQ ID NO: 37921 - protein, 29 aa, Homo sapiens
MQWTAPLACSTRVILQSLSALDNGTLSQK

SEQ ID NO: 37922 - protein, 82 aa, Homo sapiens
LARPRERRARGGGDGGRSEEQLQSPPSRHRRSRTVGLPRREEPVPLRVFEVYHTTVLKIQRGQWLLKATFCSIFCSLLLMAW

SEQ ID NO: 37923 - protein, 43 aa, Homo sapiens
LIGFLTSLKFLSGVLMTSLVDHVRDLFCLRGTGKGWTAPLSLY

SEQ ID NO: 37924 - protein, 32 aa, Homo sapiens
LEAETSWSLLGLLGAHTEAAHSQTPEPQRPPS

SEQ ID NO: 37925 - protein, 65 aa, Homo sapiens
VPASFAAASAVLSAVMPSSSRCGDTTTEESLLQGLGTLLDPFLGFRGCGDQEKVRIPKSLPCLDG

SEQ ID NO: 37926 - protein, 82 aa, Homo sapiens
LGWAGPGAGRPGRPRGREAGRGPPRAPEPGDAGLGRGHARPPLDTPAPHARPRSTGRLERGERRPQDIPPPPPPKSDSGGEN

SEQ ID NO: 37927 - protein, 31 aa, Homo sapiens
RCSWASVLPLCSPWASPTSTTTCGGRTPRSI

SEQ ID NO: 37928 - protein, 105 aa, Homo sapiens
LTSFSDRDLVAGSRKSPALLPDPFLLSLAGFLLPASLASISQPRDSLLYSRAPVARHPEPSHLQPSVFCPSLTSEGPALSFSPESPRFLSLPCLPALDSQIPADV

SEQ ID NO: 37929 - protein, 37 aa, Homo sapiens
IQKKSPWRQVQPRLGLALTVLNAVVLSVSSMLVNCTT

SEQ ID NO: 37930 - protein, 26 aa, Homo sapiens
MERYQFHSPDLYILEMLFSWETLNKL

SEQ ID NO: 37931 - protein, 49 aa, Homo sapiens [sequence omitted]

SEQ ID NO: 37932 - protein, 30 aa, Homo sapiens
MVLLTFWKVSLSSSGRISISLSNSHLPFSP

SEQ ID NO: 37933 - protein, 46 aa, Homo sapiens
MNENGKFPGLPSAQLSCLPPFASAAHASLSSVFCAWTLWAHPGHGG

SEQ ID NO: 37934 - protein, 16 aa, Homo sapiens
MKWLLVAAWRTPAALL

SEQ ID NO: 37935 - protein, 13 aa, Homo sapiens
MEECWTSFKNGLF

SEQ ID NO: 37936 - protein, 15 aa, Homo sapiens
MVILLGWAVDLIRIY

SEQ ID NO: 37937 - protein, 38 aa, Homo sapiens
MTHSTYQKYFPQLQDLAFKTGRFLPHVLLGFADLIVSI

SEQ ID NO: 37938 - protein, 27 aa, Homo sapiens
MPPLSCSLATFLSEARGASWTMQMNFG

SEQ ID NO: 37939 - protein, 46 aa, Homo sapiens
MNPHFKSSCLLEVALPVTSLHFSIHGCYSRKSSFLKHISRHMMRLM

SEQ ID NO: 37940 - protein, 35 aa, Homo sapiens
ILFLFLFLFWPTAAAMALSSSAGVHPASWVPELPV

SEQ ID NO: 37941 - protein, 36 aa, Homo sapiens
LRRLVTRLSTSLLPPPPGVALAGDVVSVMAAARPGR

SEQ ID NO: 37942 - protein, 60 aa, Homo sapiens
RCGTHWLPTKAPIRRLPHCKTTWLSLCTAMSPLTTEIWALRRGNSSASWSRAASGGRRSP

SEQ ID NO: 37943 - protein, 45 aa, Homo sapiens
LAAAVSLRRSRMRPAAVAPASAGAAAAEAAAEAAATAAPPPADLD

SEQ ID NO: 37944 - protein, 55 aa, Homo sapiens
MTSFKTAKKMNRERKLKLSKRQQIDGILLCCLGWSPSLKRSSFLGLPKQWDYRAW

SEQ ID NO: 37945 - protein, 30 aa, Homo sapiens
IVLKLLQLSEIVYMSSFFLHWLGIKLNLFQ

SEQ ID NO: 37946 - protein, 26 aa, Homo sapiens
MTKNVLKNMTFYKMAVIICLHLMHVF

SEQ ID NO: 37947 - protein, 19 aa, Homo sapiens
LAAPRRALFFRLGMLLTAG

SEQ ID NO: 37948 - protein, 34 aa, Homo sapiens
ITQSAVIVISMASSLHSSSCFQPPKPEHCLASNH

SEQ ID NO: 37949 - protein, 126 aa, Homo sapiens
RPKNCDWHTQGALIMVGLCPMLTRLALAWPSSRAPSTHLWIHLGALGTMGWWNGCSEILEEWCPHFADTPATLTALPIVLPTYLLPQSLAGEGRWPGAISLQRRGSCFDYHLHLTGQALTLPFIQV

SEQ ID NO: 37950 - protein, 45 aa, Homo sapiens
RLPKLAGHFAAVCGGAASGMPKPKAGRGINYKWSRLHPFEPRTCL

SEQ ID NO: 37951 - protein, 16 aa, Homo sapiens
IFPLALCLYFCFVFDS

SEQ ID NO: 37952 - protein, 30 aa, Homo sapiens
ILTTLLLCSLGMLLCLCIWSLFGATVDRHL

SEQ ID NO: 37953 - protein, 23 aa, Homo sapiens
MPCTGLAASVSPVSSQDGPDSLR

SEQ ID NO: 37954 - protein, 49 aa, Homo sapiens
RTLNRRISHLQGTLPFILHFVTNLQNSINWVGFHPFLAKFLKLNPLVRV

SEQ ID NO: 37955 - protein, 42 aa, Homo sapiens
LFWKMWTSTKWFHWKQIVVLTMHPFPQALNSQQVPTRMMMSS

SEQ ID NO: 37956 - protein, 44 aa, Homo sapiens
VLHIPASPSSRPHSQAPSQLPRAGRAALISKMLLKAHGHDCTPH

SEQ ID NO: 37957 - protein, 61 aa, Homo sapiens
ISVSFLAMFFCRNYGSFWFYVLSKMLSFFICLLIFVHLLLLSFLISDWPPPTGSAEHKYSG

SEQ ID NO: 37958 - protein, 37 aa, Homo sapiens
IKGVLCVPGMVLLWCPWCDPSPAGNSLREVGPLHQCC

SEQ ID NO: 37959 - protein, 46 aa, Homo sapiens
LISHLLSPITSILFPPVSPSPPQFPPCPSFPPSSPSPGHFANLWLL

SEQ ID NO: 37960 - protein, 45 aa, Homo sapiens
VALVAAAAAAAAALERFLSGSAGGPPGWSTCKSRSGAPGIDGDEL

SEQ ID NO: 37961 - protein, 13 aa, Homo sapiens
LSVVDLSLICILL

SEQ ID NO: 37962 - protein, 56 aa, Homo sapiens
LRNPARKDIGGGLALKLLFKTRKRRRKRKKRKMLGNIYLTCSTARTLASCCYSCKY

SEQ ID NO: 37963 - protein, 66 aa, Homo sapiens
VCSMPGALPLCITSFKSFIPGLYITSWQWSSCRAIPRHRKLWALLSTSIISSSSTGKTSWTLLMPS

SEQ ID NO: 37964 - protein, 69 aa, Homo sapiens
LVLLGRPPVGMGLSVLLPLCLLGPGRFTSGQKPLDTPGLGAAVLSVRKAGLKMRSHLTPSVCTVPSPGS

SEQ ID NO: 37965 - protein, 57 aa, Homo sapiens
TKDLESASPFLRSVSGRRKSPNMFSRFASPTRKLATCRVLEVETIWGLLAAVQQIYL

SEQ ID NO: 37966 - protein, 19 aa, Homo sapiens
LIVLFFLLAVHFGGYYKEI

SEQ ID NO: 37967 - protein, 41 aa, Homo sapiens
MIDEVKQDSLALPGLCGDREDLEIKETLVTWKFMLRVVTSQ

SEQ ID NO: 37968 - protein, 16 aa, Homo sapiens
LVSAGSSLLACSLLLA

SEQ ID NO: 37969 - protein, 106 aa, Homo sapiens
MPRLSLVVLLLSILDGAPGHHFRLSEYCKKQAQTSPKQSCHTWIGLFLIRKSSWSLLNLAATWNMISLVLNYFITNSAQILTCLMITKELEGCVSWWKRAVKIEFW

SEQ ID NO: 37970 - protein, 12 aa, Homo sapiens
LRGTLLGCWGQH

SEQ ID NO: 37971 - protein, 26 aa, Homo sapiens
LRPKRRSVAGVVAAAATVSWGPRAAL

SEQ ID NO: 37972 - protein, 11 aa, Homo sapiens
TTLLLSLCTCV

SEQ ID NO: 37973 - protein, 9 aa, Homo sapiens
IYDWLLGLL

SEQ ID NO: 37974 - protein, 72 aa, Homo sapiens
TCPCSATGARAVTMLVATGQCSRCFMFTFSTFSFNCHNSEVDSVRDRLPQDHSAPANSMQLTLTLNTLQLHS

SEQ ID NO: 37975 - protein, 34 aa, Homo sapiens
MPRPRACASWPLLAAVSGLRGLEWPPSWRRWWQQ

SEQ ID NO: 37976 - protein, 8 aa, Homo sapiens
LWLLFAVV

SEQ ID NO: 37977 - protein, 13 aa, Homo sapiens
VWGPVTIWSFVLC

SEQ ID NO: 37978 - protein, 14 aa, Homo sapiens
RLMKEESPVVSWRL

SEQ ID NO: 37979 - protein, 28 aa, Homo sapiens
TARLKSLQWLTKLILVRVTLATDLSMEG

SEQ ID NO: 37980 - protein, 45 aa, Homo sapiens
MPVGIFCHMACTIPSRAAGGREIWMAQRTGCTTEFLTRRRTCFLT

SEQ ID NO: 37981 - protein, 22 aa, Homo sapiens
MNLPGTAAAADLLAIFSQSAPC

SEQ ID NO: 37982 - protein, 10 aa, Homo sapiens
MPQTCEKWNF

SEQ ID NO: 37983 - protein, 33 aa, Homo sapiens [sequence omitted]

SEQ ID NO: 37984 - protein, 26 aa, Homo sapiens
TRRTGSSLTFWMSLSSTRSVRRPVGG

SEQ ID NO: 37985 - protein, 19 aa, Homo sapiens
MFFIMILMQGIQMIMDRII

SEQ ID NO: 37986 - protein, 38 aa, Homo sapiens
LSPVPQQQVVLIALFVQCFGLGPSAFPRSSTLHPAQPC

SEQ ID NO: 37987 - protein, 9 aa, Homo sapiens
ILFSALILR

SEQ ID NO: 37988 - protein, 18 aa, Homo sapiens
LVSACRFFLCLFSALPRP

SEQ ID NO: 37989 - protein, 39 aa, Homo sapiens
LTRPRFFLFLDSIFAVAGTAVQSPICSSLSAPRSYTPSR

SEQ ID NO: 37990 - protein, 10 aa, Homo sapiens
LSLDKIEKNS

SEQ ID NO: 37991 - protein, 16 aa, Homo sapiens
VAQFFLALLLQVNWWI

SEQ ID NO: 37992 - protein, 95 aa, Homo sapiens
VETMERGRVELGSPCLVGERELTYPQQQLRDDDVGELGRQVEWGAQLWVLYAGVERPVSRMGQKQENGSHVLGLHGGPQLAAQRLLRGAQRRQEQ

SEQ ID NO: 37993 - protein, 7 aa, Homo sapiens
ILETGSG

SEQ ID NO: 37994 - protein, 20 aa, Homo sapiens
ILFHAGGLATKACLLAAAIC

SEQ ID NO: 37995 - protein, 53 aa, Homo sapiens
LEGSCRPQVGEEERRKAVRCLSWKPTMSCDEIQATELCFSPKQQMESSFRTII

SEQ ID NO: 37996 - protein, 21 aa, Homo sapiens
MERGILWMLVLLNPLPAGPPG

SEQ ID NO: 37997 - protein, 22 aa, Homo sapiens
KNFLHQIFIFLSLPSRATCTSY

SEQ ID NO: 37998 - protein, 12 aa, Homo sapiens
MKGWLSLPLMVT

SEQ ID NO: 37999 - protein, 26 aa, Homo sapiens
RFYRITLTKVPWSFMSQHILLFLFLQ

SEQ ID NO: 38000 - protein, 12 aa, Homo sapiens
VSLWLFVMLPKI

SEQ ID NO: 38001 - protein, 17 aa, Homo sapiens
IWRKTSLWCFIAVHWLG

SEQ ID NO: 38002 - protein, 35 aa, Homo sapiens
VMLLLIYLGSWLAGEAEPLLKAWLPRKICSVQPRA

SEQ ID NO: 38003 - protein, 11 aa, Homo sapiens
LPSWVWFLWCF

SEQ ID NO: 38004 - protein, 23 aa, Homo sapiens
LCMLLTVSLFSSQLRVKISPSGQ

SEQ ID NO: 38005 - protein, 10 aa, Homo sapiens
RVSIALPSLP

SEQ ID NO: 38006 - protein, 13 aa, Homo sapiens
IAADTAAVWLGLL

SEQ ID NO: 38007 - protein, 34 aa, Homo sapiens
VPDVWCLVFLPLWAADIPPCFGFLVGSEGQQEAG

SEQ ID NO: 38008 - protein, 16 aa, Homo sapiens
MDDSRSGRGSHVHCMS

SEQ ID NO: 38009 - protein, 34 aa, Homo sapiens
VVMITWSMCGLVLLERVAGFLCRHSPSIKGLSRP

SEQ ID NO: 38010 - protein, 56 aa, Homo sapiens
VPFQWTWAVVAVVFLLSVQRWQVSKSPQKHAPDSVPLLSCNMLIRTTWHLPEQDFQ

SEQ ID NO: 38011 - protein, 12 aa, Homo sapiens
MWLCSLMWIAWI

SEQ ID NO: 38012 - protein, 22 aa, Homo sapiens
LDLLFLTSRWLAIIPLSGSWTL

SEQ ID NO: 38013 - protein, 42 aa, Homo sapiens
MCPNSFNEDQPMVVLCCYLCFWGFCSDFFCGICIRSRYNPRA

SEQ ID NO: 38014 - protein, 47 aa, Homo sapiens
MTRPFFAVSGRALWSRPQAACVGRLVWRTSPRLTCKDDAERNNKAYL

SEQ ID NO: 38015 - protein, 40 aa, Homo sapiens
KAFFPCYLCRYFIFLAFLEITTSCGSVSGNFTDLSPPSHK

SEQ ID NO: 38016 - protein, 38 aa, Homo sapiens
LARLLVFVLFQAALSSGVTRCQSAEKFIVQHHHKLTME

SEQ ID NO: 38017 - protein, 35 aa, Homo sapiens
VTFVRPANLIKILLESALLVSYLCQISSWETAVTT

SEQ ID NO: 38018 - protein, 39 aa, Homo sapiens
ILLDKWTSIYCAFTAAITIASSKTVSSAPSSGWMGNCSC

SEQ ID NO: 38019 - protein, 36 aa, Homo sapiens
MAGAMGKEHNICMVYLKGIGCLCHFSALARKWSLKP

SEQ ID NO: 38020 - protein, 12 aa, Homo sapiens
LAFRALVLLDLL

SEQ ID NO: 38021 - protein, 57 aa, Homo sapiens
MPSLNLLIDYFSCSAAWTKEKFCRSSWMRPKARKLLKRSLPMNFWVLLCHPGWSAVA

SEQ ID NO: 38022 - protein, 16 aa, Homo sapiens
MVLLLVTFLSMDDLLG

SEQ ID NO: 38023 - protein, 29 aa, Homo sapiens
IIGMPLPVLLCLTLPMPLPSATARGGNRT

SEQ ID NO: 38024 - protein, 14 aa, Homo sapiens
ISISALGSLSGIWI

SEQ ID NO: 38025 - protein, 48 aa, Homo sapiens
RAWPLGLLCPLWVPAAVLRPTSGSYPASTARGHTASCHHWPKRSSWPR

SEQ ID NO: 38026 - protein, 26 aa, Homo sapiens
MVFTNIHLQISSMFVLGYHVYFLLEA

SEQ ID NO: 38027 - protein, 30 aa, Homo sapiens
LILALLHILCNLGPLSALRAGREEVLFGPR

SEQ ID NO: 38028 - protein, 61 aa, Homo sapiens
MRSTLAASIPTISSQGSSGHPFTKDWIVLWKSVLYMGITPSSFRFTQKRGSTVMGNWAMNQ

SEQ ID NO: 38029 - protein, 39 aa, Homo sapiens
TLAVMIGPQRASVSILWAFWRSCWMLSTETSTRNKTRTT

SEQ ID NO: 38030 - protein, 18 aa, Homo sapiens
IIGCIVAFTLFHLLDMGK

SEQ ID NO: 38031 - protein, 20 aa, Homo sapiens
IIGCIVAFTLFHLLDMDLSP

SEQ ID NO: 38032 - protein, 25 aa, Homo sapiens
TKFRSRSLTSGLFAGGVGAEPDWSG

SEQ ID NO: 38033 - protein, 45 aa, Homo sapiens
LVMKSLTATSSMKVLLPRTFWTRKLMKFLLLMIRMPSMWQTWETF

SEQ ID NO: 38034 - protein, 40 aa, Homo sapiens
ILRPSCRQSLMPAVFLTWGLRLVSACICLILAVAFLDLRM

SEQ ID NO: 38035 - protein, 32 aa, Homo sapiens
MWVIGCSLKTWALTLLLLPLRSMASRGRRSTM

SEQ ID NO: 38036 - protein, 55 aa, Homo sapiens
LLNFFMYVTLLLKHQSFSQTYGMASSQIYLIKKKKLFYRNYSQRNLRIDLTHLKY

SEQ ID NO: 38037 - protein, 31 aa, Homo sapiens
RHLLLFLLWQMLFLQLWCPQPPARALLLLFL

SEQ ID NO: 38038 - protein, 13 aa, Homo sapiens
IFQIVIIFHLWIC

SEQ ID NO: 38039 - protein, 26 aa, Homo sapiens
LLLLTLWVRTAFVSCNTHGEGLQVHF

SEQ ID NO: 38040 - protein, 23 aa, Homo sapiens
LLTPAPSTLPLAASAAVAAGGAV

SEQ ID NO: 38041 - protein, 17 aa, Homo sapiens
VSLILFQLCLWLPGLYL

SEQ ID NO: 38042 - protein, 34 aa, Homo sapiens
MWWKTPCWWTPSTTATSSSAEARSCGRLLKSMAG

SEQ ID NO: 38043 - protein, 29 aa, Homo sapiens
MYLLWKIVRNKSLLWTTIFLWCLLRDLLS

SEQ ID NO: 38044 - protein, 44 aa, Homo sapiens
IRKKQKREGAGILFLYHLACLFCGNLRAVHFYQGISCFEKSLDS

SEQ ID NO: 38045 - protein, 15 aa, Homo sapiens
LYSFYCLLDFCLVFL

SEQ ID NO: 38046 - protein, 26 aa, Homo sapiens
MLCSQKDIRYFLLQLVMFLFELQLES

SEQ ID NO: 38047 - protein, 33 aa, Homo sapiens
IRTPIFVMNLTISYNFIVYFVFNAQLLHTLNLL

SEQ ID NO: 38048 - protein, 32 aa, Homo sapiens
IQSFQCLHLPVLLLGMPSCWVCSLSEVSEKIH

SEQ ID NO: 38049 - protein, 20 aa, Homo sapiens
KVNRKISRALAELHLLAFLA

SEQ ID NO: 38050 - protein, 19 aa, Homo sapiens
MGLEPGLKGRQSDGWRTWN

SEQ ID NO: 38051 - protein, 32 aa, Homo sapiens
VVSRVWLPACLRGLFPPSSARASTSCSWGQIA

SEQ ID NO: 38052 - protein, 34 aa, Homo sapiens
KTTMKILTVVMQKMKLMNMMSWSSCSLMVNGITT

SEQ ID NO: 38053 - protein, 93 aa, Homo sapiens
IACLIVAVAALPLLSQRERDTSGQAQPQPQQQPPRRHGGARHKERGCLRGGVGGSLCRMTIRGPAPAPPHLRLPTSKPRKKQTPPRRRRVKSA

SEQ ID NO: 38054 - protein, 38 aa, Homo sapiens
ILCEKPQRRLFSRALASSSASSFASSCLLPASAAATPA

SEQ ID NO: 38055 - protein, 46 aa, Homo sapiens
TGCAFLFFTLFHFQEGLVRTSETLFSYSIGDTVHTPSTSKPLKGFV

SEQ ID NO: 38056 - protein, 14 aa, Homo sapiens
IVWFIFVFISFKIM

SEQ ID NO: 38057 - protein, 72 aa, Homo sapiens
IGLSSALPVLHLGSALVLLGSKLLAFTFDPKHLKPWATHGGREHHHPSVHTSISFSSWCWLVFLTSVQVLST

SEQ ID NO: 38058 - protein, 34 aa, Homo sapiens
LWGRTPGGSARPWRQETALLRFCLGSLLFALDGS

SEQ ID NO: 38059 - protein, 32 aa, Homo sapiens
MEFSPGAGIILIIMHLSCLIYTTSVHSKSILN

SEQ ID NO: 38060 - protein, 10 aa, Homo sapiens
MQNFVFLTVL

SEQ ID NO: 38061 - protein, 17 aa, Homo sapiens
MDLWWWFSNWNIIFTCL

SEQ ID NO: 38062 - protein, 11 aa, Homo sapiens
VRYFFLQVWLF

SEQ ID NO: 38063 - protein, 16 aa, Homo sapiens
IWIKRFLVSIPFISCV

SEQ ID NO: 38064 - protein, 22 aa, Homo sapiens
LAALWRTTLVFFLAARGPRIHR

SEQ ID NO: 38065 - protein, 37 aa, Homo sapiens
KKCSLMLVSVIFVRPKKPISWDTWFIGYFWQLWVEEN

SEQ ID NO: 38066 - protein, 16 aa, Homo sapiens
RIPRMMNAQWLMHMLL

SEQ ID NO: 38067 - protein, 24 aa, Homo sapiens
ISILFCLTTWMATSMNLMDECLFR

SEQ ID NO: 38068 - protein, 79 aa, Homo sapiens
TAARRRKPKPSPGPSLRGPIRPVHPGPRSPGRGAQSCAHEPCAGRAWAWRRRVPGLRRLCGGSSLLAVGSLAGAARPGP

SEQ ID NO: 38069 - protein, 50 aa, Homo sapiens
MESNGSIMKIMSQKMWVLCVALIYQDKRDMLPLVHLCSLFLSCSFNKCYL

SEQ ID NO: 38070 - protein, 23 aa, Homo sapiens
IKPFRVMPACLLMVCKTITFLGS

SEQ ID NO: 38071 - protein, 16 aa, Homo sapiens
IKPFRVMPACLLMQLF

SEQ ID NO: 38072 - protein, 37 aa, Homo sapiens
LDLFVMTIWQLFAVLIVLFAKSREISTEGEPCVLSKN

SEQ ID NO: 38073 - protein, 59 aa, Homo sapiens
MAALGTRTSRGRPGLREQMPQQDRSSAAFDDLEARQHPLYCLLWVVSESQTCLDSRKRN

SEQ ID NO: 38074 - protein, 28 aa, Homo sapiens
KLMDISILIMSVWYLYRMEKKSQVHVPV

SEQ ID NO: 38075 - protein, 41 aa, Homo sapiens
RNRTEYKILSMRELLLCLLMEVFTAQGFLILIQEIRSWYGD

SEQ ID NO: 38076 - protein, 76 aa, Homo sapiens
LSVRTCPGPAPSSSPLPLSPPGRGSLVAASPPPPQTRWTPRRKTYVECVGQKEHLRNRFIILVYVLAVLSLSIKNA

SEQ ID NO: 38077 - protein, 16 aa, Homo sapiens
MLFRCEIFFLFLLFGS

SEQ ID NO: 38078 - protein, 26 aa, Homo sapiens
VRGLNLRLGWLFSACCGGTAVGFCWV

SEQ ID NO: 38079 - protein, 68 aa, Homo sapiens
MGWASYQEPRMLRCPPKWIASYLVPACCRLLHLVPLGTHCAANSSRQIHWEAVAHEGISETFFCDLAV

SEQ ID NO: 38080 - protein, 19 aa, Homo sapiens
VELLLITMVVISSLNAGFI

SEQ ID NO: 38081 - protein, 28 aa, Homo sapiens
MQNEMCQWSRAVLSLVMSYTMCLTGAGH

SEQ ID NO: 38082 - protein, 83 aa, Homo sapiens
IPTRRFLGRGPNKKREEMEITSPDLAFLSLFLFSPLPSDDWRVKGNPERGGEQRFEKMQECVWRRVKLPFKLWPPGTRCSAAG

SEQ ID NO: 38083 - protein, 102 aa, Homo sapiens
LRHHPCHCRALAALLTAWSHALRRATGGRWVTSIRAAAARRREKASKKEEWEEEGKRRRRKRRRRKRGAQRIQVSRREVNTKNHVCRAAGPVHDPGFGVGHL

SEQ ID NO: 38084 - protein, 52 aa, Homo sapiens
RLDMLTVLSPPAFGLGFSSLFTCRLSHSLPFPQHHSPRKSQCFPPIILSADP

SEQ ID NO: 38085 - protein, 20 aa, Homo sapiens
ILQAFYWPVIFLCVPYRPPP

SEQ ID NO: 38086 - protein, 24 aa, Homo sapiens
TVTAIASCMPLLSTCGAFRTQTWY

SEQ ID NO: 38087 - protein, 25 aa, Homo sapiens
MEKQSLCICSLLVLGFWLLLAFINS

SEQ ID NO: 38088 - protein, 90 aa, Homo sapiens
LPALTLSPLLLATSRFLGCLCPLCGQRGRTFGPGPGGGGGSLRPPPLPLPPPYPPRSGKRRRLRHGLGSRRSRRGRWRQDPDAALPPGAN

SEQ ID NO: 38089 - protein, 36 aa, Homo sapiens
LFFLFFFFSPCCRCLRVLPLRCRPGRRARLWVPGGG

SEQ ID NO: 38090 - protein, 31 aa, Homo sapiens
KESPSPLSAAWLAAAASSVFLASFMRKLAEC

SEQ ID NO: 38091 - protein, 24 aa, Homo sapiens
RVRTRGGGVNAAPGNGRSTGLDQA

SEQ ID NO: 38092 - protein, 13 aa, Homo sapiens
IVYQGQTLCLWLL

SEQ ID NO: 38093 - protein, 75 aa, Homo sapiens
VLRIQNGLMPASIFLIIIVIFLIMLVIHQILFGSELKPGLDKKNLPMQSQKNLLYAEMEKLDHLNWISERRRSKS

SEQ ID NO: 38094 - protein, 69 aa, Homo sapiens
ISLLRRCCCRHTRSPCLALLLEIVSLFSFAVPQSPTLHPLFSPILREPIQIPLPFFPCRPSYGRERCGQ

SEQ ID NO: 38095 - protein, 66 aa, Homo sapiens
LFLSLLSLPLFPSRRAPRPGRGSREAGGVVCYPVAPGTSLGYAPRRRSHCCGRRSAEGPRYWLPAV

SEQ ID NO: 38096 - protein, 29 aa, Homo sapiens
IASTLSFLLCTQMGWLDESSSWLSKECTV

SEQ ID NO: 38097 - protein, 35 aa, Homo sapiens
KKSRSVRRRRLGKVFLCLGSMEAASRHLPATLMLL

SEQ ID NO: 38098 - protein, 43 aa, Homo sapiens
KDRVPSGRSHAAAASGALGAADWLAVQILLNPLVKTETQNGCK

SEQ ID NO: 38099 - protein, 36 aa, Homo sapiens
KDRVPSGRSHAAAASGALGAADWLAVQGADFKSKRR

SEQ ID NO: 38100 - protein, 23 aa, Homo sapiens
VAPWALLAAALASESPARTSAAS

SEQ ID NO: 38101 - protein, 12 aa, Homo sapiens
VNKFGMVLYIFI

SEQ ID NO: 38102 - protein, 82 aa, Homo sapiens
MLWDPALPRLAVYASCLFFSCLDAHEGPVHGPRGRGEGGRGSERQRVRPGGGGGAGSVHIHLEEEDGAEDQDHRDEDWITKK

SEQ ID NO: 38103 - protein, 23 aa, Homo sapiens
MSKLCPILWILMKLGCSKDLKEN

SEQ ID NO: 38104 - protein, 38 aa, Homo sapiens
LIFHSSFLCLVLTVFVYFKGEKTRGTKPAGSIHHRGWF

SEQ ID NO: 38105 - protein, 79 aa, Homo sapiens
MYRSSPSPASCACASSLPPSCRPSSSTCGSATRTPAPAAPCSCWPRQSRTWATWTRRLPGPRRLGWSRCSPPCARAWRS

SEQ ID NO: 38106 - protein, 33 aa, Homo sapiens
VDVIAGNERVAAAALVTAACIPIVFSSKVYMIT

SEQ ID NO: 38107 - protein, 18 aa, Homo sapiens
VAFLFRRFPSEYSKTKIK

SEQ ID NO: 38108 - protein, 32 aa, Homo sapiens
MLTPALRHLSGSILLSLAYMDTSAHRHVTAGC

SEQ ID NO: 38109 - protein, 22 aa, Homo sapiens
KLFQLLTWLSMKSSLTVTLTQS

SEQ ID NO: 38110 - protein, 38 aa, Homo sapiens
MLVWLPWASAAARAFCAISVRPMAGCGQASPCWVPGCC

SEQ ID NO: 38111 - protein, 27 aa, Homo sapiens
LNARPLIPFFPPLSLGLLIKARPFPQP

SEQ ID NO: 38112 - protein, 20 aa, Homo sapiens
ILFIFLYTIFSLTNVEPSNR

SEQ ID NO: 38113 - protein, 69 aa, Homo sapiens
LTALFLLCRSAASLPRVPRAQAANTRYPWRSEVGCCTDSSAKCPPTPGAGCTRSWPRAQRRRRRRRRRG

SEQ ID NO: 38114 - protein, 10 aa, Homo sapiens
MSLWLHALLV

SEQ ID NO: 38115 - protein, 39 aa, Homo sapiens
RHRAAAPGRGAGVDPAAGRDGAGGAAAAAAGGGAGPAAA

SEQ ID NO: 38116 - protein, 17 aa, Homo sapiens
IHQYKQMHLFTLTLAFF

SEQ ID NO: 38117 - protein, 33 aa, Homo sapiens
MSCENAHALPSTPPFFLFFLFPFFPLVPSPSSL

SEQ ID NO: 38118 - protein, 29 aa, Homo sapiens
ISLLGQDAVLAGSSISTARILSGNTEVVL

SEQ ID NO: 38119 - protein, 63 aa, Homo sapiens
MKLLVCFQSSTMARSSLFSGLTIPVHPSPSTWEPQKSNCKLGASRSRLTSTGAWLRVPSWSPK

SEQ ID NO: 38120 - protein, 53 aa, Homo sapiens
MARSSLFSGLTIPVHPSPSTWEPQKSNCKLGASSRSRLTSTGAWLRVPSWSPK

SEQ ID NO: 38121 - protein, 40 aa, Homo sapiens
LRLQEQLHWHGRILFQAGLLLCSTVLVEEFYPVYCLQSLH

SEQ ID NO: 38122 - protein, 67 aa, Homo sapiens
TGSGRLLSRSRQRLEARGRSPASGRSAAAPLPCALFPAGPERPPPPPGGSRAKGSREAGPGEELACS

SEQ ID NO: 38123 - protein, 30 aa, Homo sapiens
INQNLPSMMVLLLQLDCLTMDIYLRVQLKI

SEQ ID NO: 38124 - protein, 46 aa, Homo sapiens
MRTRLEKAPTLQTGGSCPSCSLSLASLRLKWQLIGFILWCLAWSSL

SEQ ID NO: 38125 - protein, 26 aa, Homo sapiens
KPSRAAGVALIAGGATSWPWMSRTPL

SEQ ID NO: 38126 - protein, 17 aa, Homo sapiens
RAELGTLWAGLLPAWTL

SEQ ID NO: 38127 - protein, 32 aa, Homo sapiens
INSLCTFSFPSCLFFFVVLYSCCLSTMCQTLC

SEQ ID NO: 38128 - protein, 36 aa, Homo sapiens
MRKLIAGIIFLKIWTCTVRTSTDLMLSCLISGQVAV

SEQ ID NO: 38129 - protein, 60 aa, Homo sapiens
IYIVLVLNVLLLVSLMGVYGIQMVLTQRNWKTSNCNMGPFWASPRQSPMKEASWRPTVTY

SEQ ID NO: 38130 - protein, 7 aa, Homo sapiens
IVFIWMY

SEQ ID NO: 38131 - protein, 16 aa, Homo sapiens
RTLRLTVFSLLMMSSC

SEQ ID NO: 38132 - protein, 30 aa, Homo sapiens
KEFFSMICGMLLLQTYGTGRFSRRRLQSMV

SEQ ID NO: 38133 - protein, 10 aa, Homo sapiens
LPTPERKAKE

SEQ ID NO: 38134 - protein, 23 aa, Homo sapiens
IDCEAKCCEGNQRQLRCRGSNSE

SEQ ID NO: 38135 - protein, 37 aa, Homo sapiens
MERMSRRRCTARSKTDTVLGPRAHVPGRRGSSINDQP

SEQ ID NO: 38136 - protein, 46 aa, Homo sapiens
LQVRVFIMWVTVMMSNAFAVMVDSGVGNLEMIHGFNMPSGFQGVST

SEQ ID NO: 38137 - protein, 15 aa, Homo sapiens
KRPPTTLLLSLCTCV

SEQ ID NO: 38138 - protein, 42 aa, Homo sapiens
MSPQWEAHPSRNLSSSQMKLLTISVVVASAMCSHGLHTRRKL

SEQ ID NO: 38139 - protein, 117 aa, Homo sapiens
LIPYISRYISGGSSGLEMTDLLSPLPAILGPRGQERPGIQGVPQLSFTRIYRPALPTSQHPAWQRNGTEDGAAGRYQHFRNCDRILLRCQGWSALVQSRLTANSASQVQVILLCQFL

SEQ ID NO: 38140 - protein, 37 aa, Homo sapiens
RSFLFVPCWKEAAVLRAQVVVFSSLEAMAHLHFCALS

SEQ ID NO: 38141 - protein, 50 aa, Homo sapiens
VLFPLCFSPVLGQSCPRSRVGLRVCAGAAGAISPLGGRWSPGARGRDHGG

SEQ ID NO: 38142 - protein, 42 aa, Homo sapiens
VLLIAWVVVGVSLQRRILTVKKQSGSRGPPLIPQGPDGGQRG

SEQ ID NO: 38143 - protein, 17 aa, Homo sapiens
LVRRNERRRENREVLPQ

SEQ ID NO: 38144 - protein, 33 aa, Homo sapiens
TVWSCVISSCVALSSLTVRGRSWCWRTWRTPAC

SEQ ID NO: 38145 - protein, 18 aa, Homo sapiens
IQKVRTTPSGKASRDRRQ

SEQ ID NO: 38146 - protein, 56 aa, Homo sapiens
MLIDGSDSHQIFPCLLCKDSRESRAKPCHSSIRRAKSFIHAEEQADHAATALVFTF

SEQ ID NO: 38147 - protein, 71 aa, Homo sapiens
MFLGERPEVLQEGLQLGSAVGARSPRDHRTCKRPPAPPPPRRSEQLDSASSNSGGTLKLRDRISPCWPCWS

SEQ ID NO: 38148 - protein, 32 aa, Homo sapiens
MVFHLPLSDLFFMLLLAPKKSRMAKEPRTYWN

SEQ ID NO: 38149 - protein, 106 aa, Homo sapiens
MRVPSWSRASTRNRPGSESQLEAMVSFYIPSISVRGPVPPHPRQHVYFNQHLMTQSKIHCLDPSTGGKGRRGGLPSFLPPEPYSRPWSGERVRTVPTTFPETSSRG

SEQ ID NO: 38150 - protein, 77 aa, Homo sapiens
MSRNSGRGGSQRRPSIQPGSALCPYLHQVGSLPCIAWGLAGLGPALLWNWMFSGSPAFPHVNTVHNIVFKVQFKTQK

SEQ ID NO: 38151 - protein, 45 aa, Homo sapiens
MPSTHLHQLGGWRCHLGRGRRAVPFRGLSLLRYILSVNLDHSCST

SEQ ID NO: 38152 - protein, 20 aa, Homo sapiens
MKPSQERAERRQVFTGSYPT

SEQ ID NO: 38153 - protein, 74 aa, Homo sapiens [sequence omitted]

SEQ ID NO: 38154 - protein, 80 aa, Homo sapiens
MIFLTFYSPHSITFDPNYSRDWIKNKWMWHTGSISNHSFSPAGLMCSETNLKHSPSSSSSLDQEELLEEQHSTNLHIDLV

SEQ ID NO: 38155 - protein, 43 aa, Homo sapiens
MHPISSETSENSQSSWGRGHKLGPGWLPYPTEVAFAIPAANRQ

SEQ ID NO: 38156 - protein, 74 aa, Homo sapiens
MKITINYHYKAVEYEVRRKTLNQYTKASQSDSSILKQFLCHFATSSQIQRLTRKPVWMNIASRSHIITSKIIEC

SEQ ID NO: 38157 - protein, 13 aa, Homo sapiens
MWKPWGENDKERG

SEQ ID NO: 38158 - protein, 31 aa, Homo sapiens
MFLGTTPVSNVRGERRRQRESLNLDAVTAQT

SEQ ID NO: 38159 - protein, 56 aa, Homo sapiens
MHLVTNEIGLVLKTSCIHPFSHCYKDIPKTGHFMKKRGLIGSRFCRLYRKHSSFHF

SEQ ID NO: 38160 - protein, 59 aa, Homo sapiens
MSSSAPKSCQGRPRPAGPQEMVQSPGPDKRHWESRSPKEGWNSGKSHVPGCDEGDKMKQ

SEQ ID NO: 38161 - protein, 61 aa, Homo sapiens
MAAEGKGSRQLASSVPICFPERGEEISEDAMPEWLTLQENRRTKSEQETYRIGENFCNLLI

SEQ ID NO: 38162 - protein, 44 aa, Homo sapiens
MLNVALFTYKQESNYTKILENMLCKVNCDLYDGDMIKKKSTSQR

SEQ ID NO: 38163 - protein, 86 aa, Homo sapiens
MTVSLFLLLATSQSQDGCCDSGSCPNSRQQEGHGAAPASRCPCRPSLQAQEPKEESTQMWWLTPVIPPLWEAEARGSLEPRSWRPT

SEQ ID NO: 38164 - protein, 46 aa, Homo sapiens
MRHPQPCGTASKGIKKIHQDRELKERLQHIRGQPFRKTESGYRSGN

SEQ ID NO: 38165 - protein, 138 aa, Homo sapiens [sequence omitted]

SEQ ID NO: 38166 - protein, 53 aa, Homo sapiens
MAGLHPWVIFSGPLWPLLTPREQTTRTTQEQIKSRPQPPRERASILFAPRVAV

SEQ ID NO: 38167 - protein, 36 aa, Homo sapiens
MDALCIHVVTQGEYGVKRGSPKKLGVSQHLGSVQRR

SEQ ID NO: 38168 - protein, 37 aa, Homo sapiens
ICSVSTFFFDSFGLNLKFYIHSSEIMICSFIYDMFIL

SEQ ID NO: 38169 - protein, 11 aa, Homo sapiens
LLLIIFSLKLG

SEQ ID NO: 38170 - protein, 46 aa, Homo sapiens
KTLKDRHFWQSCSLLAQLSFLCLDPLGPSWPWWVKTLICPVTCSRP

SEQ ID NO: 38171 - protein, 34 aa, Homo sapiens
KKVTQPSMPKGLAMINCGTQLVLSAAPAMNSWLT

SEQ ID NO: 38172 - protein, 34 aa, Homo sapiens
KRRRKRKKRKMLGNIYLTCSTARTLASCCYSCKY

SEQ ID NO: 38173 - protein, 108 aa, Homo sapiens
MGCYTWVPSKRWTVLGRCVWSSLRMIRSFWFYGKTLALLPSLERNSSVVSVALRLWSLGTGWSAVRSVAMLITRTAMFPGLQPLERERAHPGYAASVSLRSPPRGEVP

SEQ ID NO: 38174 - protein, 82 aa, Homo sapiens
MAQKPFLWQRWGFGRLTMLLHSLRVLAQSRAVVYLTSNGRCVCVCVVGEWGGVLFLQCCLPGSCSSHTYLWVAGEEDQVRMQ

SEQ ID NO: 38175 - protein, 79 aa, Homo sapiens
MQVQVTILFLATSCEKTNIWVTLVSTLVLLLVIVASAAIDHTRVVIQKLGFRWHLCQGLPTTPGLPATSSLPIISRSSR

SEQ ID NO: 38176 - protein, 78 aa, Homo sapiens
MWCLVIAVSVALPCFPGWVFASHHGGFCTTGTWLSCGWSSIAHQAGGENEEDRGLLTASHHSSAAQGQSGHEREEADI

SEQ ID NO: 38177 - protein, 59 aa, Homo sapiens
MESSTFALVPVFAHLSILQSLVPAAGAASPVAISAQHLCYSHVTPGDPGAGAGQGPAPS

SEQ ID NO: 38178 - protein, 97 aa, Homo sapiens
MSLPWSERACEGGAGVHQGSSYRVKPETPEALDLESEAVISQYTYEPVEDLKYLFKRQPKDKMHQLESTLKGPISHLLQKMFNWKSLPVLLTVCFCM

SEQ ID NO: 38179 - protein, 27 aa, Homo sapiens
LGFWPRRWRLWLAVTLAFQARPGEATR

SEQ ID NO: 38180 - protein, 16 aa, Homo sapiens
LASFLLLLFSSLLLCR

SEQ ID NO: 38181 - protein, 27 aa, Homo sapiens
MRGKPQAAVRAASAQPPQLLPWDEKAL

SEQ ID NO: 38182 - protein, 29 aa, Homo sapiens
MTSLFADGAEVESLGVSTEKTLTMKSQER

SEQ ID NO: 38183 - protein, 67 aa, Homo sapiens
MSRCLGLEPVTPPLRTGLQSNKYFAGQRCRPRVLRREVLSLEPTKTCPQDSLSLPDCVPPDGAFRLF

SEQ ID NO: 38184 - protein, 136 aa, Homo sapiens
MPRPPRGYPACRSRAAAPGWRWGRAEAAEVLRATGGWQWAGERGRQARLGLGLWRRGTLCLGSLTAPPGSPERGTGGEGGGSWAPCAAGPRGARVAAGSAGPDRVNGRAWPVPRGAPAATALAAGTGVLRGRSLPF

SEQ ID NO: 38185 - protein, 15 aa, Homo sapiens
MMFIQVSPRCSLDLL

SEQ ID NO: 38186 - protein, 48 aa, Homo sapiens
MTLQLTWNPPPRARGSTSSRARALPGIALSTGHFTHWAGPLTGVNKEA

SEQ ID NO: 38187 - protein, 9 aa, Homo sapiens
MLRTSLAVF

SEQ ID NO: 38188 - protein, 68 aa, Homo sapiens
MGTCTAWCEAATVSLSLRLPCSSARWPPPWRTVTSTVWSCVISSCVALSSLTVRGRSWCWRTWRTPAC

SEQ ID NO: 38189 - protein, 199 aa, Homo sapiens
MVSAQTEPREDFFGDVSPRKVWAAFLTLDACGQPSSPWMPVGSLPHPGCLWAAFLTLDACGQPSSPWMPVGCLPHPGCLWAAFLTLDACGQPSSPWMPVTWFPWGLPKLRDPKPPSNLMTRLVSEHTCVVPEPLTNPLCNPAHAFPILKGPAHRPAHVFPLPLLCPYLVGSCPFWALVWHFTHKCVLWVVSGPPPAVRG

SEQ ID NO: 38190 - protein, 17 aa, Homo sapiens
MTPHATGSTAWPPSCSG

SEQ ID NO: 38191 - protein, 52 aa, Homo sapiens
MKPKNPLSIFSIPAVPVKEYPSRVLDMCSEKVPMSPTTLEANADTGGRFHGS

SEQ ID NO: 38192 - protein, 127 aa, Homo sapiens
MGARVCSLLEENTPSPEQHSEWIGQQMSSAPRRPCFRTALQSAALLAEPQLLLQIEEPQREQKIKIIMEFRIAGHSLTFHNSQGRSTVVRGQGQEETMAKACLAGLEGAEGPLQMTLPGTHPQLAPV

SEQ ID NO: 38193 - protein, 115 aa, Homo sapiens
MCWPDGLMGCYTWVPSKRWTVLGRCVWSSLRMIRSFWFYGKTLALLPSLERNSSVVSVALRLWSLGTGWSAVRSVAMLITRTAMFPGLQPLERERAHPGYAASVSLRSPPRGEVP

SEQ ID NO: 38194 - protein, 36 aa, Homo sapiens
MLDSWRQPLKVTLRRVERALLKGLRIMCVGVSRSLL

SEQ ID NO: 38195 - protein, 47 aa, Homo sapiens
MTQPLPDSQGPCSWTLAAMLGGSPAATQRGHDSRGPSQASINCPTRQ

SEQ ID NO: 38196 - protein, 109 aa, Homo sapiens [sequence omitted]

SEQ ID NO: 38197 - protein, 11 aa, Homo sapiens
KSAWLMLQCSE

SEQ ID NO: 38198 - protein, 41 aa, Homo sapiens
LLATSLKWNLLVALLPLQLWCYTEKLEVSKQTREKEKHQKV

SEQ ID NO: 38199 - protein, 47 aa, Homo sapiens
TRALGTGRLRERCWGLRLSLSLFSAPPGIPLLTWVFYTPAWLPARPP

SEQ ID NO: 38200 - protein, 24 aa, Homo sapiens
ISDRYWEHKMAYQSKMAFLSFGLN

SEQ ID NO: 38201 - protein, 28 aa, Homo sapiens
IEKYLLPAFGLMLSFTWYFLSVATPMKL

SEQ ID NO: 38202 - protein, 46 aa, Homo sapiens
ISVLSRLKVTRLLLPIFRLLLAEAERLTLHNMAAWCVWCPRADESR

SEQ ID NO: 38203 - protein, 29 aa, Homo sapiens
KSSCPGSCPPVLQEAFNQTLSMPSQGPPT

SEQ ID NO: 38204 - protein, 12 aa, Homo sapiens
LFFRLGMLLTAG

SEQ ID NO: 38205 - protein, 14 aa, Homo sapiens
LRTHSRPAPYRGVE

SEQ ID NO: 38206 - protein, 18 aa, Homo sapiens
LFTTAHSGAHGMLAVLVL

SEQ ID NO: 38207 - protein, 14 aa, Homo sapiens
RLAGLLIFFLISNF

SEQ ID NO: 38208 - protein, 39 aa, Homo sapiens
TVSPAVSMIVFLLQVLLMFKIACQLLSHEFSNKKMKSLC

SEQ ID NO: 38209 - protein, 38 aa, Homo sapiens
IAYHILYLGPRLWWLNILMTATPICFRLAGRLKAPLIL

SEQ ID NO: 38210 - protein, 12 aa, Homo sapiens
MFLGSLMTFYTL

SEQ ID NO: 38211 - protein, 18 aa, Homo sapiens
IFSLCFFLFQFILNAYFS

SEQ ID NO: 38212 - protein, 16 aa, Homo sapiens
LYLLIYSFCIYQAQFW

SEQ ID NO: 38213 - protein, 43 aa, Homo sapiens
VNVLLPSCGCSTACSTTASQPSSGPCSGIDSISENSTQMLPSC

SEQ ID NO: 38214 - protein, 31 aa, Homo sapiens
LWRRSHRCSLMSSLWSQLVPVAARRQKAVSE

SEQ ID NO: 38215 - protein, 17 aa, Homo sapiens
IAVILKVFFLPLFPSQR

SEQ ID NO: 38216 - protein, 28 aa, Homo sapiens
ISTVALMSMLTASMLDRQSFYCWIVQDI

SEQ ID NO: 38217 - protein, 22 aa, Homo sapiens
MYCFCIYLVFTLGKSFPTSSKT

SEQ ID NO: 38218 - protein, 15 aa, Homo sapiens
RPEFCKVIFKVVRDN

SEQ ID NO: 38219 - protein, 13 aa, Homo sapiens
IIAGINFKLLFLF

SEQ ID NO: 38220 - protein, 36 aa, Homo sapiens
ISGRLWLATLGSACLRLSQPPRPCVVSSWVSERAGW

SEQ ID NO: 38221 - protein, 34 aa, Homo sapiens
RRTGSAQSRGSAMNLPGTAAAADLLAIFSQSAPC

SEQ ID NO: 38222 - protein, 28 aa, Homo sapiens
RYQMGLWLLSWRVTMKIILLSSGMPLLL

SEQ ID NO: 38223 - protein, 31 aa, Homo sapiens
RKTWALLTTPNALVCMSFSLSPPFLFLLPDR

SEQ ID NO: 38224 - protein, 35 aa, Homo sapiens
RKRRRKRKKRKMLGNIYLTCSTARTLASCCYSCKY

SEQ ID NO: 38225 - protein, 29 aa, Homo sapiens
LAKPLLSFLLPPLSLQLRDGPGSSVSAVL

SEQ ID NO: 38226 - protein, 75 aa, Homo sapiens
RTAELPLVLLGRPPVGMGLSVLLPLCLLGPGRFTSGQKPLDTPGLGAAVLSVRKAGLKMRSHLTPSVCTVPSPGS

SEQ ID NO: 38227 - protein, 17 aa, Homo sapiens
IDASPRGSVPTLGASSP

SEQ ID NO: 38228 - protein, 65 aa, Homo sapiens
VWWGMVPLWTCCCWSCTWRMSAAVVGGPWRTCNAYPGPWALLPPSSSGKWQNECCSRSTGCRAQS

SEQ ID NO: 38229 - protein, 73 aa, Homo sapiens
TRQHFSTSRGGHHCARRWLRRVRRSRSQTPSYQNLDPNPPIVRFPLPLERISEVPRRACLHGRDASSIKCCFP

SEQ ID NO: 38230 - protein, 14 aa, Homo sapiens
IQGYAASRFISVSD

SEQ ID NO: 38231 - protein, 51 aa, Homo sapiens
TPTLQHQWRWPPLWAEMAATRAQISIPNSLLPESGPESTHCPFSAAAGENL

SEQ ID NO: 38232 - protein, 45 aa, Homo sapiens
VCWPITLAKNSPHQCRLPIRKWWLVWLMPWPTSITKLAFLLSNFY

SEQ ID NO: 38233 - protein, 120 aa, Homo sapiens
VAAPRRTSASRWWIWRPWAGCWVRCCCWLSLASPSLSTSTMAPGSSAAVAKLRSPSPKALTTRRSSLTTRPTGRPSPAPRTTPSPRRHRCPQSPHPPALPPQAVPLSPPQRPELAEAPRR

SEQ ID NO: 38234 - protein, 25 aa, Homo sapiens
VELQRLLVFQVFLFIQLDTMMHRSS

SEQ ID NO: 38235 - protein, 53 aa, Homo sapiens
LSCLLAVPAVPAVPALSPLLPRLLDAGDASELVIGALRRAQAPSSARGAQAAP

SEQ ID NO: 38236 - protein, 33 aa, Homo sapiens
KSFCVLYGDVAVLFFRSLAPSASIRCTSCCPVP

SEQ ID NO: 38237 - protein, 14 aa, Homo sapiens
LVLTVFLECFLLFS

SEQ ID NO: 38238 - protein, 28 aa, Homo sapiens
MGNINFPDDAEKARYSFFPATLAEPESP

SEQ ID NO: 38239 - protein, 12 aa, Homo sapiens
MMTWSIWNVLML

SEQ ID NO: 38240 - protein, 42 aa, Homo sapiens
KASAALVGEASIDMNRSTTRSAPCRPMLGVYYRYKNSLWSII

SEQ ID NO: 38241 - protein, 45 aa, Homo sapiens
VEHSTRFANQEAMVPVQMGAVCEYRAQEKGRRSVNIRNCKILLNQ

SEQ ID NO: 38242 - protein, 12 aa, Homo sapiens
MAWLMGRELYYF

SEQ ID NO: 38243 - protein, 12 aa, Homo sapiens
IIYNATLLFLVS

SEQ ID NO: 38244 - protein, 47 aa, Homo sapiens
MTSPCFTSLSPTGLALARGRSRIRSRRRHIRNKFQFQSTTQHLARLG

SEQ ID NO: 38245 - protein, 94 aa, Homo sapiens
MSLRRGETSSSLQLVARLLSLSQEDALLQVWNLLLRALAWQLTLDLRVLRSLGTHLGAVAFRDRPSYRCNNLLDILLWKRKRTTRGSMALGCRN

SEQ ID NO: 38246 - protein, 47 aa, Homo sapiens
MSLSSQSVKCVCDSAFLRTQVTWRLENSMEQGKQRRCAGVYVAFIIM

SEQ ID NO: 38247 - protein, 58 aa, Homo sapiens [sequence omitted]

SEQ ID NO: 38248 - protein, 60 aa, Homo sapiens
MESRKKDIKKRILGDIFDSLDQTLPEAHISEISRYKNKYFLFIVLLDLRQALSFSDSSSS

SEQ ID NO: 38249 - protein, 95 aa, Homo sapiens
MCAFVSAAIPSSVIALLHFCWSQGRGVPANVRVVRPQPLPFYTVLGCLLACGGGRGSQYLCTVYCPEPAFIPNFSKIALKGGGRGSNIVLKGGTG

SEQ ID NO: 38250 - protein, 112 aa, Homo sapiens
MGSFISLIKNLAKEEIVPKVASILTDMLEKWCADQFMTCVPKLATEIVFAVLRSLIQMMLIYVLEKAESFPDKLLKLFRNISYFLKKMMSGQAAQEEEGNPDEFSDLLGGCD

SEQ ID NO: 38251 - protein, 52 aa, Homo sapiens
MKIPSRPAALPADAEKETRLGDAAHPYPQRAALFPLALAFGSGHSKHPWAPG

SEQ ID NO: 38252 - protein, 38 aa, Homo sapiens
MQFTFLSCFCPGTPDIRVRQTSLSPSCSESESHESSMD

SEQ ID NO: 38253 - protein, 49 aa, Homo sapiens
LSTVKDYLSNSSFQSDQVGAFLFHMFQGCTVGLFNVGVEIQSGLWKERP

SEQ ID NO: 38254 - protein, 12 aa, Homo sapiens
LWFSCGMLWIML

SEQ ID NO: 38255 - protein, 40 aa, Homo sapiens
LPQDETKFRWTLNLMKTVLRHFPFLISSFWESVLLKVVSS

SEQ ID NO: 38256 - protein, 33 aa, Homo sapiens
MMAFICLYIILIPVRGKCNTLTTALEIASHLDC

SEQ ID NO: 38257 - protein, 44 aa, Homo sapiens
MYGESKRAAIAVMLGVLTKQVGCGHSRGAKISRNSQQVTWRRII

SEQ ID NO: 38258 - protein, 145 aa, Homo sapiens
LPENRIIPLVLFHFLLLPLLTPQPPPPPRRPRLWLHGSAARARGLRAGPQGRGRRRRIMKAGVATAPDGGQQPEDEPEQPPPRRHPDAEQQSPPPPQQQLRARADPEPEEEGDRDPEEEEEEKARPLARPDLPFSRLLPLDRRDL

SEQ ID NO: 38259 - protein, 51 aa, Homo sapiens
VEQELSWLWGFLVCQMTRQMPAPNLIPSGGLADVEVARALMEAGQKPKSRL

SEQ ID NO: 38260 - protein, 88 aa, Homo sapiens
VARFSTARGSARSPGLEGCFFPTAAFLPHAWPPLGGVWMAGRVGFLFIPTAHSLGPDIFSSSSCRASRAGEEHILSMELVVKVDRGRW

SEQ ID NO: 38261 - protein, 62 aa, Homo sapiens
MHLGKEDLPAFLTSPLGFLLCSPGLWLSLLVLCWVTCHCSACMPCRSWLEPAGGDLPETLVK

SEQ ID NO: 38262 - protein, 42 aa, Homo sapiens
MVLILDSLSVVPSVLSWLFPESSGSLHIKQMLHRWICLDLPI

SEQ ID NO: 38263 - protein, 19 aa, Homo sapiens
LSLVVLPMCLLHHFLPASA

SEQ ID NO: 38264 - protein, 63 aa, Homo sapiens
LASLRELWKCFLIDTGRPVLFQSNYLPKFSVLVLELCALVSVFLSTAVILCLIILLFCFHSLL

SEQ ID NO: 38265 - protein, 7 aa, Homo sapiens
VLIYLLL

SEQ ID NO: 38266 - protein, 79 aa, Homo sapiens [sequence omitted]

SEQ ID NO: 38267 - protein, 112 aa, Homo sapiens [sequence omitted]

SEQ ID NO: 38268 - protein, 73 aa, Homo sapiens [sequence omitted]

SEQ ID NO: 38269 - protein, 82 aa, Homo sapiens
VDSASISASMATFRRQRRSCVFLCTQLTACLYGASLSGRKCLKKQRSRWCVHSADQLVWPGPGGLVARKFQVEGKCRGYLQI

SEQ ID NO: 38270 - protein, 46 aa, Homo sapiens
LSVFREGRGFSRFTIWVVYMLVEILPVCLEGSVNVRALEINKITAT

SEQ ID NO: 38271 - protein, 95 aa, Homo sapiens
LRPARAALVAPLPTPRRGLAAAAAHLPPQPPPATRTFSGPAPSGSPGTARHPRAADPARAGAPGRARHSAVASAARAAPEPRTGAQSAGDSGADP

SEQ ID NO: 38272 - protein, 18 aa, Homo sapiens
LLLVLTVVGVGLRFFTVS

SEQ ID NO: 38273 - protein, 10 aa, Homo sapiens
MACILIIFFS

SEQ ID NO: 38274 - protein, 42 aa, Homo sapiens
LRLCPRCVRPLSVTLCVSRCLAVAVTPRLSPSTSWTLPRKLH

SEQ ID NO: 38275 - protein, 132 aa, Homo sapiens
LGSSSLGEIFEFLPHPLGLLHTRPRLPASLPTHLSSFLCPPAASPALLPIPRPHSRLLPSEVVEERFPPGLVHVSRPLLAGLLGCFGPFVGTIVSHGRAGHHWGRWPTLRLLCPLGPGNIVTSRADLTNCRL

SEQ ID NO: 38276 - protein, 92 aa, Homo sapiens
MPPTPGPSILSSLVPIPVSPFHPCPPVLYLWPAPISESFFQSLIWLIPHLQLPPYMSHTIPWLALHSLLFPYSSFPVIPYQMVGTLSPALTR

SEQ ID NO: 38277 - protein, 39 aa, Homo sapiens
LRVVREFLSRILIWLLGCYLEIQALKMPASLDLEDDLDK

SEQ ID NO: 38278 - protein, 65 aa, Homo sapiens [sequence omitted]

SEQ ID NO: 38279 - protein, 26 aa, Homo sapiens
LAKKGREYKHQRQMTYIWELIRLALS

SEQ ID NO: 38280 - protein, 256 aa, Homo sapiens
LSSRQSSSPCPRSARFVSPRLAVSLSLPSRSSAAPPSLPISGPLLRALFSPQSRPFWATPLFGTPPQSAPRSFGVPLENTFHSPQGLPVSFLHILWGFCTPSRWGLASSEPPLPLGFPSSGCSPYPLGAPRSQVGVFLLGTPQYVLSSLTSGAPLCFPLVCPLSLSLLVLSQVSEHPHFSGSGSPALLSLPLCAPTSVSVVSPLCASCAEGPPLSLLLCLGPLAPPCFFSPSPLSPLLSAPCLPLPFSVFAGSLGL

SEQ ID NO: 38281 - protein, 76 aa, Homo sapiens
LRTRKMKLGGHSWICLLHFQLCSTSQRFLKNEDISALSSGGEVCLASASTLLLFTRCMHALSESGLCFPSRRDHPP

SEQ ID NO: 38282 - protein, 54 aa, Homo sapiens
MKRHQSCSLLPAQSTPDPLFNLHKIRGPDMGDFSCLRGPWTGKASLASLCPCLE

SEQ ID NO: 38283 - protein, 59 aa, Homo sapiens
LSCPPREMGNPKAPSRVSLAPWGCAVARQTMLLAAGGLQAQVMESDCPGSNFRLCLVVG

SEQ ID NO: 38284 - protein, 62 aa, Homo sapiens
LGRFVGTLNLSFLLSFQQAALLWLVESGLPGMALTSRPGADLAPGLFQPLLASCFPPPGVQW

SEQ ID NO: 38285 - protein, 31 aa, Homo sapiens
MARAATGAGKATWTLFCWLMAPRACVHKTSS

SEQ ID NO: 38286 - protein, 17 aa, Homo sapiens
VSGTFAMAWTMAVSSSV

SEQ ID NO: 38287 - protein, 95 aa, Homo sapiens
VRERGTSFSLETCVLSPQGIRNSSCPENQGSFIFFVPWSVVLNLFVIKALFVVHMSCCPLHFYLPNCTDGVTIDFSLPKLRKTSMMECTIKSVSQ

SEQ ID NO: 38288 - protein, 42 aa, Homo sapiens
LSFLGFLLSLLGFIPSEPGLAFLGCKLRAGSRSAEPRFSHLP

SEQ ID NO: 38289 - protein, 25 aa, Homo sapiens
MQLQVQWLLLVLQTPLHKPTALSWL

SEQ ID NO: 38290 - protein, 98 aa, Homo sapiens
MELKSHLVPAAPIPSVILHPNTPSWSCSLGRASMPAASAGSKPRPEARPRPAACICIPSFQCSLEQTFRYLRSFLSVPFLCMHFLFLSLLCTLAYKAN

SEQ ID NO: 38291 - protein, 44 aa, Homo sapiens
LGLYLVRCLFYIVPQEQSMSSLMQTDSNCQALICRLTLIINRGP

SEQ ID NO: 38292 - protein, 66 aa, Homo sapiens
LRGADRGGREMTAPKAFAGLSRPQRKGNPSSGLVRAASGYRMDFGRGSHHWTSKEATCRHLQPSIS

SEQ ID NO: 38293 - protein, 128 aa, Homo sapiens [sequence omitted]

SEQ ID NO: 38294 - protein, 21 aa, Homo sapiens
LNPVHALVLVLLLLPKILSRD

SEQ ID NO: 38295 - protein, 50 aa, Homo sapiens
VRNSGLSPYLLSPTFIEGCCFFSLLLKFLFAPSPPNTFHDTSLLWPEAIR

SEQ ID NO: 38296 - protein, 26 aa, Homo sapiens
MSSARELLLSILLARSFLQEPRNPCE

SEQ ID NO: 38297 - protein, 14 aa, Homo sapiens
VTTCLICLLLTGMQ

SEQ ID NO: 38298 - protein, 125 aa, Homo sapiens
VARPGPWSRASGMSPSPRWGFLCVLFTAVHPAPSTAPVQDKCPVNTWEAMQASSQQLLQTDPRPKPFLLPPLPPLLLISAGTEVSSLVFQKSPLHTQPEGAIKTVGQPTSVHSKVLSKGSLLLGE

SEQ ID NO: 38299 - protein, 116 aa, Homo sapiens
LGGMSPSPRWGFLCVLFTAVHPAPSTAPVQDKCPVNTWEAMQASSQQLLQTDPRPKPFLLPPLPPLLLISAGTEVSSLVFQKSPLHTQPEGAIKTVGQPTSVHSKVLSKGSLLLGE

SEQ ID NO: 38300 - protein, 127 aa, Homo sapiens
LAAEATSHAVSESGMSPSPRWGFLCVLFTAVHPAPSTAPVQDKCPVNTWEAMQASSQQLLQTDPRPKPFLLPPLPPLLLISAGTEVSSLVFQKSPLHTQPEGAIKTVGQPTSVHSKVLSKGSLLLGE

SEQ ID NO: 38301 - protein, 15 aa, Homo sapiens
MQFLNWMALTCFFSC

SEQ ID NO: 38302 - protein, 106 aa, Homo sapiens
LAVTPAMGTLGQCSEKTRMPSRLTTVQNRQNLMTAEPRSLSLFTKKPPRKVPPPPAGTTSVADLNPCVCSLVTSCKPTLSSLSPEQTVGLTSPPPAGGRLFPLGHT

SEQ ID NO: 38303 - protein, 61 aa, Homo sapiens
LQPPQSQPTLLCLWRAVLLGGSCPAHCRMLKGIPGLHPPLASSSQSDNSQKCLQTLPSLPR

SEQ ID NO: 38304 - protein, 95 aa, Homo sapiens
LRAALGLRSLVCALVRPPVLSTRAWPPDDAGAARAGRGSLRSLLPSAGPLRRSPQFPARTRSGPPNLRPKSGGGSGAVSRGALWNKVELEEQPPR

SEQ ID NO: 38305 - protein, 30 aa, Homo sapiens
MCEYVHPYFRSLHFILLIQCFHNGYLAFQR

SEQ ID NO: 38306 - protein, 18 aa, Homo sapiens
MYIFFCMLFGCEELSLLF

SEQ ID NO: 38307 - protein, 84 aa, Homo sapiens
ISLLWTVSLHLMLQKSSLSLLVELTPRSLGFHAWQMARKNCTTFRFQVPKGEAQGQNGNSSMRTQQSTKVGQLHVEESEQIEFA

SEQ ID NO: 38308 - protein, 14 aa, Homo sapiens
MSFIVRLLVSEFVL

SEQ ID NO: 38309 - protein, 87 aa, Homo sapiens
LMTVSLFLLLATSQSQDGCCDSGSCPNSRQQEGHGAAPASRCPCRPSLQAQEPKEESTQMWWLTPVIPPLWEAEARGSLEPRSWRPT

SEQ ID NO: 38310 - protein, 10 aa, Homo sapiens
ILWGLVGMPF

SEQ ID NO: 38311 - protein, 40 aa, Homo sapiens
MSFLRVIFKFKRCSCRCCSIFAVTLRAWRDSSQEVSCSLC

SEQ ID NO: 38312 - protein, 41 aa, Homo sapiens
LTVLLCPLVWWQCGLSATPSGTRARSCSLFSQPGASHQAGV

SEQ ID NO: 38313 - protein, 85 aa, Homo sapiens
VSPGAALLTVLPVPAVARRSAGPAATLATDAGRAATPGSWPPRRLRPPWPSGPQAPPRHPPRTASSARGSPAPCSPSSSWPGSCA

SEQ ID NO: 38314 - protein, 69 aa, Homo sapiens
VRSHTSRRADQGCCQHLPLRAPLSLGPFRTLFAHKLPKKKEPTCWYCWLVSLWSTSLLLLCYLLAPLPM

SEQ ID NO: 38315 - protein, 77 aa, Homo sapiens
TAAAGRRAGSGHGVGSGEGRRRRRSKGVGEKTSERNRKPAGEAAAAAASLGAWAALFAGCPQLRLGPGLASPARTHG

SEQ ID NO: 38316 - protein, 53 aa, Homo sapiens
MTSLSRCCRRCWGWSLSSGFWAMALPCGFSVSTSSPGNPAGFSCSTWQWLTFY

SEQ ID NO: 38317 - protein, 118 aa, Homo sapiens
MISLHMSRIDILSKKLWKSLGTMVQGCSVGFWKSSLHHIKMVLLMDMLTVWMEKLLSSVIVMIQKHKAVLFKMGRKKMQLIPYYSSIKCNPLKKNYMSLLLLKQHKSAGENTYFLVIN

SEQ ID NO: 38318 - protein, 79 aa, Homo sapiens
LSRYPRACSHPVECTFVFNKSLLLLLHSFLALFVCLSSSLFNTPRTWTLFTGNIFWQANQEKRISAWTLHSCWENEHQC

SEQ ID NO: 38319 - protein, 35 aa, Homo sapiens
MCSLGVLLSPPQSPASLPSCPLPKGKNSLEVGRAP

SEQ ID NO: 38320 - protein, 63 aa, Homo sapiens
KKRSPRWSLTMAPACAKLVLLGTTLPEPCFLPSSGAPDTRASWWAWARRTPTWATRPRASVAS

SEQ ID NO: 38321 - protein, 12 aa, Homo sapiens
LLFFFVFPLSSF

SEQ ID NO: 38322 - protein, 76 aa, Homo sapiens
LELRPCVFSRLLIRRGALGAPAWVAVPSVCGPQFLGGAWTLALRGRPVPRSVATDPRTLFAGDSRSLRLPRMMACD

SEQ ID NO: 38323 - protein, 63 aa, Homo sapiens
LSLVKSNIKICLLLILMLPAQQVHQRARMNYGCHECPCEAVGKPWLDCEGYLKSILESTRSSM

SEQ ID NO: 38324 - protein, 26 aa, Homo sapiens
KIPSLHILWVSASVLISLHTPSAFLS

SEQ ID NO: 38325 - protein, 45 aa, Homo sapiens
TGAWWARPRCKAWIAALWLSPQALRAAWSRCCSPSLAHWSPRSAC

SEQ ID NO: 38326 - protein, 35 aa, Homo sapiens
IFLLLLLLLFFLLLFLFFFFLLIFLLLVVFLPFPC

SEQ ID NO: 38327 - protein, 33 aa, Homo sapiens
MRTTTPTVLASWPSLTQSTNSTQPTALTSPLTR

SEQ ID NO: 38328 - protein, 49 aa, Homo sapiens
MWVFSPYTELKGDDNNVGTTNPPPSRGVTSVTSLLCFLLHLALFTSICI

SEQ ID NO: 38329 - protein, 47 aa, Homo sapiens
MPRSRRGTGNVSGSCTTWSCSVAWPWPAVPSSYTQQPSCSTSGGSFF

SEQ ID NO: 38330 - protein, 83 aa, Homo sapiens
MPSSLLSLGRSSQQLLQTDPRPKPFLLPPLPPLLLISAGTEVSSLVFQKSPLHTQPEGAIKTVGQPTSVHSKVLSKGSLLLGE

SEQ ID NO: 38331 - protein, 61 aa, Homo sapiens
MGVCPFAFLFCSWNPAGGFDRILGQDLVALPDDPLHSDCPLYPVLLGAPRDTFLASLRGTI

SEQ ID NO: 38332 - protein, 57 aa, Homo sapiens
LPPRACSPPSPRLHPPRSRKRQLRLRGWRRLPPPTTSALAALALRPSPAAAPPPRRR

SEQ ID NO: 38333 - protein, 30 aa, Homo sapiens
LGFANLVALSVSCFSKAAVQKERRYQEGTC

SEQ ID NO: 38334 - protein, 99 aa, Homo sapiens
IWMRKLKLRNSEEFVQCHSPVINGTKIFLLMGQDGIVKWLFTVNCNTILFMDLFAYFSLHRETFLPWLRTHSWIEPTGELSGKHLANFFFFEMESCCVA

SEQ ID NO: 38335 - protein, 65 aa, Homo sapiens
LCLSLLLAVFLFSFSSALVSWTPLLCPFFLFITQSAVIVISMASSLHSSSCFQPPKPEHCLASNH

SEQ ID NO: 38336 - protein, 48 aa, Homo sapiens
IICFFALVAPVAWVGPPAPPWQDNLLVSPSLACSSCRACELLTTGSTL

SEQ ID NO: 38337 - protein, 34 aa, Homo sapiens
ILLMLLTTWLLHSHQTRDAILDFPTLICSSPLTL

SEQ ID NO: 38338 - protein, 141 aa, Homo sapiens
KREREREREGEARPGEAGPSGSGLRGRGAGLGAGAGSGAASLSAPALLEPHEPLSPWRARGRGTGARRLLLVKYPSRPETRAASRPREVYSPAPFLKGRNRSFSQRTAFLSAFLALSEIGGPQGWQARLAGLLIFFLISNF

SEQ ID NO: 38339 - protein, 9 aa, Homo sapiens
RAFFFFWVM

SEQ ID NO: 38340 - protein, 33 aa, Homo sapiens
LCFSSLCVLWSLILLYRNSFKNYVITPRIFCNV

SEQ ID NO: 38341 - protein, 120 aa, Homo sapiens
KEAGRRRLHSLARSLASRRRCGSALRFLLAIRSVARARNSSTSAGSELGSGVLRAGGHRARSEPAPHLWSRRPSGEPAGVPPRECSGRRAARAPAEARPPAGRRAHHGAPSARVQRLLPR

SEQ ID NO: 38342 - protein, 35 aa, Homo sapiens
VAKGRRRGLSFRGSLPFLCCRSVTLALSPCLDHFL

SEQ ID NO: 38343 - protein, 88 aa, Homo sapiens
LSQGARKLCHCATWVFFILQSLPQQNRTPQTPSSSLCVALSGSNKSKLWVCECLCVLLFTSHLLKSVYVRGWGVCVKESEEEKEREIN

SEQ ID NO: 38344 - protein, 13 aa, Homo sapiens
LNMTLLLTLTLGG

SEQ ID NO: 38345 - protein, 44 aa, Homo sapiens
LARNPGSATLENSSSHNNFIQFIFKAQLYFMLSVIIFLDTFQIL

SEQ ID NO: 38346 - protein, 84 aa, Homo sapiens
IDWVSGAFFFSPLSFFSSVLLHARKLQSAARPPWVRDIQPRSLPCIVQPKDERPKGRKLKKSPTCAGSVHGLGKGIQRRWERRV

SEQ ID NO: 38347 - protein, 88 aa, Homo sapiens
KRAFGARASRGGARSLPVPLPLVISAALGGPGRSETESESPGAKPGETQLRRTPAPLSLLLRPSRGASPSAPRAGELGAQVPAAPGMV

SEQ ID NO: 38348 - protein, 51 aa, Homo sapiens
VYLRVRPILPAGLCLGVTLPELAPTTVATVMLMCDCCQEPAHMTVWRKFFP

SEQ ID NO: 38349 - protein, 45 aa, Homo sapiens
LLTAQRRGLGIRSRWPYAGGWSRGSAARLAAVVGSDGERAARLEQ

SEQ ID NO: 38350 - protein, 50 aa, Homo sapiens
LRQRRPIFLFLLLLSLLNLKTMMKSYIMIYLHLMNNSFPCKVIKVLPRRH

SEQ ID NO: 38351 - protein, 23 aa, Homo sapiens
MEKRRAGSREAQVKGDFILFFNF

SEQ ID NO: 38352 - protein, 79 aa, Homo sapiens
LMLKTTPRILEESIREGRQFWKHFKNRSTESNRRMMFKLSPIGLLFMFVNIPGTNFNINNLKFYGSIQSCVKPESRDQT

SEQ ID NO: 38353 - protein, 108 aa, Homo sapiens
LCFLFYFIYFIFRFSVLISPREGDLGIHPMSSRELPWPRSESSWDATGSESAPQVSPPAPPNLSIPTRITPSAAGRGAREPGGLLEPAQQDPLSPIFCSRARGLSGQS

SEQ ID NO: 38354 - protein, 26 aa, Homo sapiens
MCVCVCVCVCVCARAHVHMCVGRWRG

SEQ ID NO: 38355 - protein, 37 aa, Homo sapiens
LSRAEKQRRGKLEAPLARDRNLESLATSILLRPEQAS

SEQ ID NO: 38356 - protein, 91 aa, Homo sapiens
MVVFPSLSSPTMMTVCSGSVGGRAASGPNPKTKGLCAPTRPPRKEIALPAGWGPLPTVPRLLPTQLRHLPHSGTVEKTAEPPPPFTFQKSV

SEQ ID NO: 38357 - protein, 64 aa, Homo sapiens
LDFTHVLFLIRLLKQKLKKKKQSKRDMTLWSLLILLRRGGKVLAMDLLTVKIPLIIISSRQEIE

SEQ ID NO: 38358 - protein, 33 aa, Homo sapiens
MTAAVSLTRSPAISASCAASRSASPWAWPWTWF

SEQ ID NO: 38359 - protein, 44 aa, Homo sapiens
MSVLTTTYAPRREGERETCPLFDPCFVTFFFFFFLLKVNLPVTF

SEQ ID NO: 38360 - protein, 125 aa, Homo sapiens [sequence omitted]

SEQ ID NO: 38361 - protein, 16 aa, Homo sapiens
VAQCVPCAQPKCLAHS

SEQ ID NO: 38362 - protein, 75 aa, Homo sapiens
VWMSVRSSTSSGLPNTFSMKAVCTGPHSIRLKLLAGEQRVGGGGRQPGPSPSPNPSPSPNHVPAPDREQHRCAGK

SEQ ID NO: 38363 - protein, 37 aa, Homo sapiens
MADGQGSSLGGLNLPCGTSLQGTPTSPSNTDPEGAPG

SEQ ID NO: 38364 - protein, 60 aa, Homo sapiens
VPLPKPLGPIHGKRDLPLHLLHAALSPPAAGVAGMGGPAAGGCPAVPEPQVPVKSPGPTH

SEQ ID NO: 38365 - protein, 213 aa, Homo sapiens
LTTFVSPPCSVPCPPGLPHFLSFFKKKKKYGGGRGLEEPRPGLCSLRDISPWGSSSRDSNYQTKPAPDQPGPPHPLLHLRFRHGQWTGEWGWGVPKSLMRPSTPAAQSKVGWKLGEDPFLPRGACHLDPCIGTGGREHGEEEGRCLQENRHCPGGPLPCPLQEGAAWTRSWGRGQKCFLYMCIYFFLSSELSTRRFLPISAAVSVVISGRGRV

SEQ ID NO: 38366 - protein, 66 aa, Homo sapiens
LMCTALCWALVLGDRCSVVECVPRNREGAMGARSQGIRNIPPRTHSHLFSNSAYLLNSPDALPVDC

SEQ ID NO: 38367 - protein, 114 aa, Homo sapiens
LFFVFWWFLFFVFFVLRWSLTLSPRLECSGTILAHCNLRLLGSSNSPASAFQVAGITGTHHHTQLIFVFLIERGFFHVGQAGLELLTSGDPPASASQSAEITGMSYHAWPVLLF

SEQ ID NO: 38368 - protein, 37 aa, Homo sapiens
LTSPKVISNLKWTLFQLLGASLPLFMVAGKLPPRRLF

SEQ ID NO: 38369 - protein, 104 aa, Homo sapiens
MAATSACSTFNWKSPHMSWFSLLKICLSSLGGLMHFSVSADQLLPPPNLNGRMRHSGFSYPKRGFFPLFVSIIHFIGRNSVPVNSNWDQRNRVPLLKMAVTRGY

SEQ ID NO: 38370 - protein, 56 aa, Homo sapiens
VRSGPARARGVRAGGRGSPLALLIRMKTLLFGVWTLLALILCPGIQKDTSLGITVY

SEQ ID NO: 38371 - protein, 120 aa, Homo sapiens
LSFSLQPLALLIRMKTLLFGVWTLLALILCPGVPEELFEVSIWPSQALVEFGQSLVVNCSTTCPDPGPSGIETFLKKTQVGKGPQWKEFLLEDVTENSILQCFFSCAGIQKDTSLGITVY

SEQ ID NO: 38372 - protein, 70 aa, Homo sapiens
LFGVWTLLALILCPDPGPSGIETFLKKTQVGKGPQWKEFLLEDVTENSILQCFFSCAGIQKDTSLGITVY

SEQ ID NO: 38373 - protein, 119 aa, Homo sapiens
VSLASLLPARAPRPWPPRPLLRRGRDSARRHFWTRLLLSVLFLRAPLQTAAPGTDPPPGLGALLACPGVPASRCARQGSGGVQLHLGRGTGPEGLGGHESLASAAFVFQRGGSDEPLLT

SEQ ID NO: 38374 - protein, 50 aa, Homo sapiens [sequence omitted]

SEQ ID NO: 38375 - protein, 15 aa, Homo sapiens
LCLLDLFFFLVVLRS

SEQ ID NO: 38376 - protein, 54 aa, Homo sapiens
MTTREDAERRPGGGSGEKQRQGRLPIGEPRVPGPSVLCTYAEAPTRPVTANCLA

SEQ ID NO: 38377 - protein, 34 aa, Homo sapiens
MLLMKTVLGKWFCLLTGFTHGDEALECGHFVLYG

SEQ ID NO: 38378 - protein, 107 aa, Homo sapiens
LVLFLLILPATPRKQSEPKTTDAAAPGTADTAGPGTMDTAVPRKAETAVPGKRNTAVPGTADPASPGTADTAEPMRTTTPTVLASWPSLTQSTNSTQPTALTSPLTR

SEQ ID NO: 38379 - protein, 44 aa, Homo sapiens
LAGHRILLCNIHFLLPISLKGLLLVGLLCTVLQVSSAKGASRGK

SEQ ID NO: 38380 - protein, 73 aa, Homo sapiens [sequence omitted]

SEQ ID NO: 38381 - protein, 27 aa, Homo sapiens
MLCTTLQTVCSLILMDIVWARGRDGWL

SEQ ID NO: 38382 - protein, 60 aa, Homo sapiens
LERLLCQEAAALLGRACPRLPSLFLILLLFSSQMIKGIWHSTPGPFDCFILELVYIMKPC

SEQ ID NO: 38383 - protein, 47 aa, Homo sapiens
VGAGTAGRLAGRGCLQSWPLLLIVPLLLQGGIVCPRVPERVPEERRG

SEQ ID NO: 38384 - protein, 27 aa, Homo sapiens
VAPTLLGLGSQGLISSSVERAGSTPLL

SEQ ID NO: 38385 - protein, 83 aa, Homo sapiens
LFLFLFLFLWGGATKQTQSILCQVLGWTGQLCVGVVFFSIFLFVSCFLIMFTICLNHSVFYKDSTSSPLSSPLLRPLRLLGDA

SEQ ID NO: 38386 - protein, 24 aa, Homo sapiens
MKDICRDPISTKSHILRLLVGVSF

SEQ ID NO: 38387 - protein, 17 aa, Homo sapiens
LALTTERYHLTVLEAKV

SEQ ID NO: 38388 - protein, 27 aa, Homo sapiens
MRRMETLARQCLWAASFAGPPPKPRTS

SEQ ID NO: 38389 - protein, 98 aa, Homo sapiens [sequence omitted]

SEQ ID NO: 38390 - protein, 61 aa, Homo sapiens
MAGTKMTDGGWQANTGGLLTPRGESAWGQFFSRPCCSHQLQHRRGRLLRKSSHGPGSRSTF

SEQ ID NO: 38391 - protein, 60 aa, Homo sapiens
VAAAGRRALWFGSAFVSVLLPLPPLLPPLASPAPVCGAAGTQDHVSVSLRGDAPAHGKCL

SEQ ID NO: 38392 - protein, 427 aa, Homo sapiens; identical to SEQ ID NO: 5931

SEQ ID NO: 38393 - protein, 82 aa, Homo sapiens
VALSLLTSQGRQRRAGPSTAFAALPATVATFSAMTESESLRTSRHADTALARVRRGAKFRGQARTRYCARARSHRFTPPSGA
